(19) United States
(12) Patent Application Publication
(10) Pub. No.: US 2004/0235717 A1
(43) Pub. Date: Nov. 25, 2004

(54) Suppression of androgen receptor transactivation through new pathways to ar and ar coactivators and repressors

(76) Inventor: Chawnshang Chang, Pittsford, NY (US)

Correspondence Address: NEEDLE & ROSENBERG, P.C., SUITE 1000, 999 PEACHTREE STREET, ATLANTA, GA, 30309-3915, US

(21) Appl. No.: 10/473,939

(22) PCT Filed:
(86) PCT No.: PCT/US02/11086

Related U.S. Application Data
(60) Provisional application No. 60/282,266, filed on Apr. 6, 2001.
(60) Provisional application No. 60/365,060, filed on Mar. 13, 2002.

(51) Int. Cl. A61K 38/17; G01N 33/567; G01N 33/53

(52) U.S. Cl. 514/12; 435/7.2

(57) ABSTRACT

Disclosed are compositions and methods for related to signal transduction pathways related to androgen receptor.

[0001] 1. This application claims priority to U.S. patent application Ser. No. 60/282,266 filed on Apr. 6, 2001 for “Suprression of Androgen Receptor Transactivation Through New Pathways to AR” which is incorporated by reference herein in its entirety, and to U.S. patent application Ser. No. 60/365,060 filed on Mar. 13, 2002 for “Signaling Pathways Related to Androgen Receptor” which is incorporated by reference herein in its entirety.

### I. BACKGROUND OF THE INVENTION

[0002] 2. The androgen receptor (AR), a transcription factor, belongs to the nuclear receptor superfamily. Once bound to androgen, AR translocates into the nucleus, leading to activation of its target genes (Chang, C. S., Kokontis, J. & Liao, S. T. (1988) Science 240, 324-6). AR consists of the amino-terminal region that is involved in transcriptional activation, as well as the DNA-binding domain (DBD) and the ligand-binding domain (LBD) that are involved in androgen binding and receptor dimerization (Derynck et al. (1998) Cell 95, 737-740). It is generally accepted that AR plays an important role in the development of reproductive organs and in prostate cancer progression (Derynck et al. (1998) Cell 95, 737-740; Massagué. (1998) Ann Rev of Biochem 67,753-791). After binding to ligand, the activated AR is able to recognize palindromic DNA sequences, called androgen response elements (AREs), and form a complex with AR associated proteins to induce the expression of AR target genes. Several AR coregulators, androgen receptor associated proteins (ARAs) such as ARA24, ARA54, ARA55, ARA70, ARA160, Rb, TIFIIH and steroid receptor coactivator-1 (SRC-1), have been isolated and characterized (Yeh et al. (1999) Keio J Med 48, 87-92; Kang et al. (1999) J Biol Chem 274, 8570-6; Fujimoto et al. (1999) J Biol Chem 274, 8316-21; Yeh et al. (1996) Proc Natl Acad Sci USA 93, 5517-21; Miyamoto et al. (1998) Proc Natl Acad Sci USA 95, 11083-8; Yeh et al. (1998) Biochem Biophys Res Commun 248, 361-7; Miyamoto et al. (1998) Proc Natl Acad Sci USA 95, 7379-84; Yeh et al. (1998) Proc Natl Acad Sci USA 95, 5527-32). Results from these studies suggest that coregulators not only can enhance AR transactivation, but may also be able to increase the agonist activity of antiandrogens and 17-β estradiol (E2) in prostate cancer DU145 cells.

[0003] 3. Reports have suggested that AR transactivation could be also induced by growth factors such as epidermal growth factor (EGF), insulin-like growth factor-1 (IGF-1), keratinocyte growth factor (KGF) (Culig et al. (1994) Cancer Res 54, 5474-8) and cytokines like interleukin-6 (IL-6) via an ligand-independent manner (Hobisch et al. (1998) Cancer Res 58, 4640-5). However, the range androgen dependent signal transduction pathways involving AR is not known. Disclosed herein are various signal transduction pathways that interact with AR, including PI3K pathways, Akt pathways, p21 pathways, TGF-β pathways, Smad3 pathways, Smad4 pathways, PTEN pathways, and specific IL6 pathways, and Herk/Neu pathways. Also disclosed are compositions and methods involving these various pathways for identifying modulators of androgen receptor activity and and modulators of androgen related cell growth. Also disclosed are modulators of these pathways, and methods of treating androgen related diseases, such as prostate cancer.

### II. SUMMARY OF THE INVENTION

[0004] 4. In accordance with the purposes of this invention, as embodied and broadly described herein, this invention, in one aspect, relates to methods and compositions related to signal transduction pathways related to androgen receptor.

[0005] 5. Additional advantages of the invention will be set forth in part in the description which follows, and in part will be obvious from the description, or may be learned by practice of the invention. The advantages of the invention will be realized and attained by means of the elements and combinations particularly pointed out in the appended claims. It is to be understood that both the foregoing general description and the following detailed description are exemplary and explanatory only and are not reflective of the invention, as claimed.

### III. BRIEF DESCRIPTION OF THE DRAWINGS

[0006] 6. The accompanying drawings, which are incorporated in and constitute apart of this specification, illustrate several embodiments of the invention and together with the description, serve to explain the principles of the invention.

[0007] 7. FIG. 1 shows induction and repression of AR transactivation by IL-6 via PI3K or MAPK. (a) Effect of IL-6 on AR transactivation. DU145 cells were transfected for 24 h with AR and MMTV-CAT reporter gene. After transfection, the cells were serum starved for 24 h , then 20 μM LY294002 or PD98059 was added to serum-free medium 30 min prior to IL-6 treatment. After 30 min of treatment with IL-6, DHT was added for another 24 h. The cells were then harvested and AR transactivation was measured by CAT activity. (b) Activation of PI3K activity by IL-6 in LNCaP, PC-3 and DU145 cells. After serum starvation for 24 h, LNCaP, PC-3 or DU145 cells were treated with 50 μg/ml IL-6 for 30 min, and then harvested. PI3K activity was measured by using phosphatidylinositol (PI) as a substrate. (c) Enhancement of AR transactivation through the inhibition of PI3K activity by Δp85 and LY294002. After 24 h transfection, the DU145 cells were treated with vehicle or LY294002 for 30 min prior to DHT treatment. The transactivation was measured by CAT activity. (d) Inhibition of AR transactivation by p110* in a dose dependent manner.

[0008] 8. FIG. 2 show suppression of AR transactivation by Akt. (a) Suppression of AR transactivation by PI3K via Akt but not p70S6K. The DU145 cells were treated with LY294002 or rapamycin for 30 min prior to DHT treatment, the transactivation activity was determined after 24 h transfection. (b) Dose dependent inhibition of AR transactivation by cAkt or enhancement of AR transactivation by dAkt.

[0009] 9. FIG. 3 shows AR is a downstream target of Akt. (a) Interaction of Akt with AR in vivo. Cells lysates were immunoprecipitated (IP) with anti-Akt or normal IgG (N-IgG). The immunoprecipitated complexes were immunoblotted (IB) with AR antibody (NH27) or anti-Akt antibody, respectively. (b) Transactivation by mtARS210A is not inhibited by Akt. DU145 cells were transfected with plasmids encoding wtAR, mtARS210A or mtARS790S in conjunction with cAkt or dAkt for 24 h. The ligand treatment and transactivation was determined as previously described.

[0010] 10. FIG. 4 shows the effect of PI3K on the interaction between AR and ARAs. (a) Modulation of interaction between AR and ARAs by cAKT, dAkt or LY294002. The DU145 cells were transfected with 2.5 μg GAL4-ARA70 and 2.5 μg VP16-AR, followed by treatment with LY294002 or vehicle 30 min prior to DHT treatment. The interaction between AR and ARA70 was determined by CAT assay using pG5CAT as reporter (b) The enhanced AR transactivation by various AR coactivators, such as ARA70, ARA54, TIF2 or SRC-1 could be further promoted in the presence of LY294002 or Δp85. The transactivation was determined as previously described.

[0011] 11. FIG. 5 shows the feed-back inhibition on IL-6 secretion and PI3K activity by A-AR. (a) Inhibition of IL-6 secretion by DHT. LNCaP cells were treated with DHT for 24 h and then PMA was added for another 24 h. IL-6 secretion in the medium was determined by ELISA. (b) Inhibition of IL-6-mediated PI3K activation by DHT. LNCaP cells, were serum starved for 24 h. DHT and IL-6 were added for 30 min. PI3K activity was measured using PI as a substrate. The origin (ori) of the chromatogram and PI3-phosphate (PI3P) were indicated.

[0012] 12. FIG. 6 shows a model for the cross-talk and bi-directional regulation of AR and IL-6 signal cascade. See text for details.

[0013] 13. FIG. 7 shows AR is a direct Akt target (A) Akt-consensus phosphorylation sites (S210 and S790) of AR are responsible for AR phosphorylation. wtAR, mtAR S210A, or mtAR S790A were transfected into DU145. After transfection, whole cell extract was immunoprecipitated with the anti-AR antibody, NH27. Half of the precipitated complex was treated with Akt and [γ-³²P] ATP for 2 h and analysed by SDS-PAGE. In order to verify the equal expression levels of the wtAR and mtAR constructs, the remaining immunoprecipitates were subjected to western blot analysis as shown on the bottom panel. (B) Akt interacts with AR in LNCaP cells in vivo. LNCaP cell lysates were immunoprecipitated (IP) with anti-Akt or normal IgG (N-IgG). The immunoprecipitated complexes were immunoblotted (IB) with AR antibody (NH27) or anti-Akt antibody, respectively. (C) In vitro phosphorylation of AR by Akt, but not by PI(3)K. 1 μg N-DBD AR or 1 μg DBD-LBD AR purified from E. coli. was treated for 1 h with Akt or PI(3)K. Phosphorylation of the AR was detected by separation on 12.5% SDS-PAGE and autoradiography. The Akt and PI(3)K used in this experiment are active, as determined by phosphorylating H2B and PI, respectively, which is shown on the upper panel of FIG. 7A.

[0014] 14. FIG. 8 shows phosphorylation of AR by Akt in vivo. (A) Activation of Akt by IGF-1. COS-1 cells were pretreated with ethanol or 20 μM LY294002 for 30 min, followed by treatment with 100 ng/ml IGF-1 for 30 min. The total cell lysates were immunoprecipitated by anti-Akt antibody (New England Biolabs). The immunocomplex was subjected to SDS-PAGE, followed by immunoblot with phospho-Akt (S473) antibody or Akt antibody. (B) IGF-1 phosphorylates AR in vivo via Akt. COS-1 cells were cultured in [³²P]-PO₄-containing medium. AR immunocomplex was subjected to SDS-PAGE followed by autoradiography. Immunobloting confirmed equivalent amounts of AR in immunocomplex. (C) cAkt, but not dAkt, phosphorylates wtAR, but not mtAR S210A and mtAR S790A in vivo. COS-1 cells were transfected with wtAR, mtAR S210A, or mtAR S790A in combination with PCDNA3 vector, cAkt, or dAkt. After 24 h transfection, cells were labeled with [³²P]-PO₄ for 4 h. (D) Suppression of AR transactivation by Akt in a dose-dependent manner. The DU145 cells were transfected with various plasmids, as indicated, for 24 h, followed by DHT treatment for another 24 h. Transactivation was measured by CAT activity using MMTV-CAT as a reporter. (E) mtAR S210A is resistant to Akt suppressive effect on AR transactivation. DU145 cells were transfected with plasmids encoding wtAR, mtAR S210A or mtAR S790A in presence of cAkt or dAkt for 24 h. Ligand treatment and AR transactivation were performed as previously described. The data are means±s.d. from three independent experiments.

[0015] 15. FIG. 9 shows inhibition of AR transactivation by PI(3)K/Akt pathway. (A) AR transactivation is enhanced through the inhibition of PI(3)K activity by Δp85 and LY294002. The DU145 cells were treated with LY294002 for 30 min prior to DHT treatment, the transactivation activity was determined after 24 h transfection. (B) Suppression of AR transactivation by p110* in a dose-dependent manner. (C) Suppression of AR transactivation by PI(3)K via Akt but not via p70S6K. The DU145 cells were transfected with plasmids, as indicated, for 16 h. Cells were treated with 20 nM rapamycin or 20 μM LY294002 for 30 min prior to 1 nM DHT treatment. The data are means±s.d. from three independent experiments.

[0016] 16. FIG. 10 shows effect of PI(3)K/Akt pathway on the interaction between AR and ARA70. (A) Modulation of interaction between AR and ARA70 by cAkt, dAkt, or LY294002. The DU145 cells were transfected with 2.5 μg GAL4-ARA70 and 2.5 μg VP16-AR, followed by treatment with LY294002 or vehicle 30 min prior to DHT treatment. The interaction between AR and ARA70 was determined by CAT assay using pG5-CAT as a reporter. (B) The enhanced AR transactivation by various AR coactivators, ARA70, ARA54, TIF2, and SRC-1, could be further promoted in the presence of LY294002 or Δp85. The data are means±s.d. from three independent experiments.

[0017] 17. FIG. 11 shows PI(3)K/Akt pathway suppressed androgen/AR-induced apoptosis. (A) PC-3(AR)2 and PC-3(AR)6 expressed AR protein. PC-3 cells were stably transfected with AR, followed by selection with hygromycin B, and confirmed by western blotting using AR antibody NH27, while LNCaP was used as a positive control. (B) Androgen/AR-induced apoptosis in PC-3(AR)2, PC-3(AR)6, and SAR-91 were inhibited by PI(3)K/Akt pathway. SAR-91, S7MC, PC-3(AR)2, and PC-3(AR)6 were treated with LY294002 (20 μM) or HF (5 μM) for 30 min, followed by addition of IGF-1 (100 ng/ml) for another 30 min prior to DHT (10 nM) treatment After 3 days, cell apoptosis was analyzed by TUNEL assay. The data are means±s.d. from three independent experiments.

[0018] 18. FIG. 12 shows androgen/AR-induced apoptosis and p21 expression were inhibited by Akt. (A) Akt suppressed androgen/AR-induced p21 promoter activity. PC-3 cells were transfected with different plasmids, as indicated, for 16 h, followed by DHT treatment for another 16 h. p21 promoter activity was determined by luciferase activity. (B) Androgen/AR-induced PC-3(AR)6 apoptosis and p21 protein expression was blocked by Akt PC-3(AR)6 was transfected with pCDNA3, cAkt, or dAkt, as indicated, for 16 h. The cells were then treated with DHT for 3 days, then cell apoptosis determined by TUNEL assay. p21 protein expression was detected by western blotting using p21 monoclonal antibody. (C) AR-induced p21 protein expression was enhanced by dAkt in LNCaP cells. LNCaP stable clones (pCDNA3 and dAkt) were treated with 10 nM DHT for 2 days, then the p21 protein expression was detected. LNCaP stable transfection with dAkt was confirmed by western blot assay using phospho-Akt (Ser473) antibody. (D) Potentiation of DHT/TPA-induced cell apoptosis and p21 protein expression by androgen in LNCaP cells. LNCaP cells were pretreated with HF or vehicle for 30 min followed by treatment with DHT for 24 h. TPA was then added for another 24 h and cell apoptosis was determined by TUNEL assay. (E) Activation of PI(3)K/Akt pathway by IGF-1 suppresses DHT/TPA-induced apoptosis. LNCaP stable clones (pCDNA3 and dAkt) were treated with 10 nM DHT for 24 h followed by treatment with 20 μM LY294002 for 30 min. IGF-1 was added for another 30 min, followed by 10 nM TPA treatment for another 24 h. The apoptosis was determined by TUNEL assay. The data are means±s.d. from three independent experiments.

[0019] 19. FIG. 13 shows the ligand-induced transactivation of AR is enhanced by treatment with TGF-β. (A) CAT assays were performed with extracts from DU145 cells transfected with AR expression vector (pSG5-AR) (1 μg) in the presence (+) or absence (−) of DHT (10⁻⁸ M) or TGF-β1 (10 ng/ml) or specific TGF-β1 neutralizing antibody (20 mg/ml). (B). In the left panel, PC-3 cells were transfected with pSG5-AR (1 μg) in the presence (+) or absence (−) of DHT (10⁻⁸ M) with increasing amounts of TGF-β1. In the right panel, a fixed amount of TGF-β1 (10 ng/ml) was added into transfected PC-3 cells with increasing amounts of specific TGF-β1 neutralizing antibody. (C), PC-3(AR)2 cells stably transfected with AR were overexpressed with TGF-β type I (TβRI) or type II (TβRII)receptor or constitutively active TGF-β type I receptor (TβRI-T204D) as indicated. 3 μg of MMTV-CAT or MMTV-Luc was used as a reporter plasmid in all experiments. All values represent the averages+SD of four independent experiments.

[0020] 20. FIG. 14 shows the association of Smad3 with AR in mammalian two-hybrid interaction system. (A) SW480.7 cells were co-transfected with 3 μg of Gal4-Smad3 encoding the full-length cDNA of Smad3 fused to the Gal4-DBD and 4.5 μg of VP16-AR encoding the full-length cDNA of AR fused to the activation domain of VP16. Interaction was estimated by determining the level of CAT activity from 3 μg of the reporter plasmid pG5-CAT in the presence of 10⁻⁸ M DHT. (B) DU145 cells were transfected with Gal4-Smad3 and VP16-AR expression-vectors in the presence (+) or absence (−) of DHT and TGF-β. Each CAT activity is presented relative to the transactivation observed in the absence of DHT. All values represent the mean+SD of four independent experiments.

[0021] 21. FIG. 15 shows In vivo and in vitro interaction between Smads and AR. (A) and (B) Co-immunoprecipitation of AR and Smad3. (A) PC-3 cells that overexpressed Flag-Smad3 and AR (B) PC-3 and PC-3(AR)2 cells were treated with or without DHT. Cell extracts were prepared and immunoprecipitations were performed using anti-FLAG antibody or anti-Smad3 antibody, followed by immunoblotting using antibody to AR. (C) The wtAR and different AR deletion mutants used in the GST-pull down assay are show schematically. (D) Interaction domains of AR for Smad3. A series of [³⁵S]-labeled mtARs incubated with GST-Smad3 or GST alone in the presence (+) or absence (−) of 10 nM DHT were tested for interaction in the GST pull-down assay.

[0022] 22. FIG. 16 shows the effects of Smad3 on AR-mediated transcriptional activity. (A) SW480.7 cells were co-transfected with 1 μg of pSG5-AR, 3 μg of MMTV-CAT, and 3 μg of Smad3 expression vectors in the presence (+) or absence (−) of DHT (10⁻⁸ M) or TGF-β (10 ng/ml). (B) DU145 cells were co-transfected with 3 μg of Smad3 or Smad3ΔC mutant expression vectors with 1 μg of pSG5-AR and 3 μg of MMTV-CAT, in the presence (+) or absence (−) of DHT (10⁻⁸ M) or TGF-β (10 ng/ml). Each CAT activity is presented relative to the transactivation observed in the absence of DHT and an error bar represents the mean+SD of four independent experiments.

[0023] 23. FIG. 17 shows the androgen-response element is important for TGF-β/Smad3-enhanced AR transactivation. (A) DU145 cells were transiently co-transfected with AR (2 or 4 μg) and either (TAT)₂-CAT, MMTV-CAT or PSA-CAT (3 μg), in the presence (+) or absence (−) of DHT (10⁻⁸ M) or TGF-β(10 ng/ml). (B) DU145 cells were transiently co-transfected with AR (2 or 4 μg) and either (TAT)₂-CAT, MMTV-CAT or PSA-CAT (3 μg), and Smad3 expression vector (6 or 10 μg) in the presence (+) or absence (−) of DHT (10⁻⁸ M). Each CAT activity is presented relative to the transactivation observed in the absence of Smad3. All values represent the mean+SD of three independent experiments.

[0024] 24. FIG. 18 shows the effect of Smad3 on the transcriptional activities of wtAR, mtAR, PR, VDR, and ER. (A) DU145 cells were transiently co-transfected with 3 μg of reporter plasmids (MMTV-CAT for AR, and PR, ERE-CAT for ER and VDRE-CAT for VDR), 1 μg of each receptor constructed in pSG5, and 4.5 μg of Smad3 expression vector in the presence of 10⁻⁸ M of each cognate ligand. Each luciferase and CAT activity is presented relative to the transactivation observed in the absence of Smad3. (B) 1.5 μg of wtAR were co-transfected with 4.5 μg of Smad3 or ARA70 in the absence or presence of DHT, E2, or HF at indicated concentrations. (C) The LNCaP mtARt877a was used to replace the wtAR to perform the same experiment as (B). All values represent the mean+SD of three independent experiments.

[0025] 25. FIG. 19 shows AR-induced PSA expression is potentiated by Smad3. (A) Smad3 enhanced androgen/AR-induced PSA mRNA expression. LNCaP cells were transfected with Smad3 and parent vector as indicated for 16 h, followed by DHT treatment for another 16 h. PSA expression level was determined by Northern blotting. The probe was obtained from exon 1 of the PSA gene and labeled with [α-³²P] dCTP. A β-actin probe was used as a control for equivalent mRNA loading. (B) A model for androgen and TGF-β pathways in AR-mediated PSA transcription.

[0026] 26. FIG. 20 shows PTEN suppresses AR transactivation involving the pathways other than PI3K/Akt (A) The LNCaP, PC-3, or DU145 cells were transfected with plasmids, as indicated, in 10% CDS media for 16 h and treated with 10 nM DHT for another 16 h. The cells were harvested and assayed for luciferase activity using MMTV-luc as a reporter. (B) LNCaP cells were transfected with plasmids as indicated for 24 h and then treated with DHT for another 24 h. The cells were harvested for Northern blot analysis. (C) LNCaP cells were transfected with plasmids as indicated in 10% CDS media for 16 h and then treated with 10 nM DHT for another 16 h. The cells were harvested and assayed for the luciferase activity. (D) LNCaP cells were transfected with plasmids as indicated in 10% CDS media for 24 h and then treated with DHT for 24 h The cells were harvested for Northern blot analysis. (E) The PC-3 cells were transfected with ERα along with plasmids, as indicated, using ERE-luc as a reporter for 16 h, followed by 10 nM E2 treatment for another 16 h. The cells were harvested for luciferase assay. Data are means±s.d. from three independent experiments.

[0027] 27. FIG. 21 shows PTEN interacts with AR in vitro. (A) GST or GST-PTEN incubation with the [³⁵S]-labeled AR, ER, or RXR for 2 h in the presence or absence of the ligand. The bound proteins were analyzed by SDS-PAGE, followed by autoradiography. (B) Representation of PTEN deleted mutants. PTP domain, protein tyrosine phosphates domain; Ty-p, tyrosine phosphorylation domain. (C) [³⁵S]-labeled AR was incubated with different PTEN deleted mutants. The nearly equivalent aliquots of PTEN deleted mutants used are shown in the right panel. (D) Representation of AR deleted mutants. (E) GST or GST-PTEN was incubated with different AR deleted mutants. (F) The His-AR-N-DBD was incubated with [³⁵S]-PTEN or [³⁵S]-PTEN C124S for 2 h. The bound protein was analyzed by the SDS-PAGE, followed by autoradiography.

[0028] 28. FIG. 22 shows PTEN interacts with AR in vivo. (A) The establishment of stable PTEN and PTEN C124S clones in LNCaP cells by Dox-inducible system The cells were treated with 4 μg/ml Dox for 24 h and harvested for western blot analysis using PTEN antibody. (B) The stable PTEN clone 1 (PTEN-C1) was treated with 4 μg/ml Dox in 10% CDS media for 24 h and treated with ethanol or DHT for another 24 h The cells were harvested for immunoprecipitation assay. (C) The cell lysates from the CWR22 were immunoprecipitated by anti-PTEN antibody, followed by Western blot analysis. (D) The CWR22 cells were labeled by [³⁵S]-methionine for 4 h in the presence of the 10 nM DHT. The cells were harvested for co-immunoprecipitation. Lane 1: 10% input; Lane 2: IP by non-immune IgG; Lane 3: IP by anti-AR antibody; Lane 4: The PTEN protein was depleted from the cell lysates by anti-PTEN antibody before IP by anti-AR antibody; Lane 5: IP by anti-PTEN antibody. (E) CWR22 cells were transfected with vector or Akf for 48 h and the cells were harvested for immunoprecipitation assay.

[0029] 29. FIG. 23 shows PTEN colocalizes with AR in vivo. (A) The COS-1 cells were transfected with AR or PTEN in 10% CDS media for 16 h and treated with ethanol or 10 nM DHT for another 16 h. The cells were fixed and stained with AR and PTEN antibodies, followed by examination with confocal microscopy. (B) The COS-1 cells were transfected with AR and PTEN and treated with ethanol or 10 nM DHT for another 16 h. The cells were fixed and stained with AR and PTEN antibodies, followed by examination with confocal microscopy. The green and red colors represent PTEN and AR staining, respectively, and the yellow color represents PTEN and AR colocalization.

[0030] 30. FIG. 24 shows PTEN decreases AR protein level via promotion of AR degradation (A) COS-1 cells were transfected with AR with a flag epitope in front of the AR sequence, along with pCDNA3 or PTEN in 10% CDS media for 16 h. The cells were harvested for Western blot analysis. (B) LNCaP cells stably transfected with vector, PTEN, or PTEN-C124S were treated with 4 μg/ml doxycycline in 10% CDS media for 48 h in the presence of 10 nM DHT. Western blot analysis was performed and AR and PTEN were detected by AR antibody or PTEN antibody. (C) PTEN-C1 cells were treated with 4 μg/ml Dox in 10% CDS media for 48 h. Total RNA was prepared and Northern blot analysis was performed using [³²P]-dCTP-labeled AR (aa, 1-389) as a probe. (D) COS-1 cells were transfected with AR along with pCDNA3 or PTEN in 10% CDS media for 16 h. The cells were then pulsed with [³⁵S]-methionine for 45 min in the presence of 10 nM DHT and harvested at different chase times as indicated. The cell extracts were immunoprecipitated with AR antibody and subjected to SDS-PAGE followed by autoradiography. Data were from three identical results. (E) COS-1 cells were transfected with AR along with pCDNA3 or dAkt in 10% CDS media for 16 h, pulsed with [³⁵S]-methionine for 45 min, and then harvested at different chase times as indicated. LY294002 (20 μM) was added 2 h before pulsing with [³⁵S]-methionine.

[0031] 31. FIG. 25 shows the interaction between PTEN and AR contributes to PTEN-induced suppression of AR functions and apoptosis. (A) The LNCaP cells were transfected with plasmids in 10% CDS media, as indicated for 16 h, treated with 10 nM DHT for 24 h, harvested and the cell extracts were subjected to SDS-PAGE. (B) The LNCaP cells were transfected with plasmids in 10% CDS media, as indicated for 16 h and then treated with 10 nM DHT for another 16 h, harvested and assayed for MMTV-luciferase activity. (C) The CWR22 cells were transfected with plasmids as indicated using (ARE)4-luc as a reporter for 16 h, followed by ethanol or 10 nM DHT treatment for another 16 h, and harvested for luciferase assay. (D) The LNCaP cells were transfected with plasmids as indicated for 16 h, and the medium was changed to 0.1% CDS media for 2 days. The cell apoptosis was determined by TUNEL assay (E) The LNCaP cells were transfected with plasmids as indicated for 16 h, harvested, and the cell extracts were subjected to SDS-PAGE. The Akt activity was determined by Western blotting using phospho(S473)-Akt antibody. (F) The U87MG cells were transfected with plasmids as indicated for 16 h, and the medium was changed 0.1% CDS media for 2 days. The cell apoptosis was determined by TUNEL assay. Data for luciferase activity and apoptosis are means±s.d. from three independent experiments.

[0032] 32. FIG. 26 shows ligand-induced transactivation of AR is enhanced by Smad3 but repressed by Smad3/Smad4. (A) CAT assays were performed with extracts from PC-3-AR)2 cells transfected with the indicated amount of Smad3 or Smad4 expression vector (μg) in the presence (+) or absence (−) of 10⁻⁸ M DHT. LNCaP cell were transfected with Smad3 or Smad4 expression vector instead of PC-3(AR)2 cells in experiments otherwise identical with those in A (B), PC-3(AR)2 cells stably transfected with AR were over-expressed with the indicated amounts of Smad3 or Smad4 or SRC-1. 3 μg of MMTV-CAT was used as a reporter plasmid in all experiments. All values represent the averages±SD of four independent experiments. (C) LNCaP cells were transfected with Smad3, Smad4, and parent vector as indicated for 16 h, followed by DHT treatment for another 16 h. PSA expression level was determined by Northern blotting. The probe was obtained from exon 1 of the PSA gene and labeled with [α-³²P] dCTP. A β-actin probe was used as a control for equivalent mRNA loading. (C, Table 1) The RNA samples from (A) were reverse transcribed to cDNAs and all of the samples were subjected to real-time CR using an ABI Prism 7700 Sequence Detection System (Perkin-Elmer Applied bio systems). PCR was performed using the SYBR Green PCR Core Reagents kit (Perkin-Elmer Applied Bio systems). PSA and β-actin forward, reverse primers concentrations were 2.5 μM. To reduce variability between replicates, PCR premixes which contained all reagents except for total RNA were prepared and aliquoted into 1.5 ml microfuge tubes. Specific PCR amplification products were detected by the fluorescent double-stranded DNA-binding dye SYBR Green core reagent kit. Experiments were performed with triplicates for each data point.

[0033] 33. FIG. 27 shows an In vivo interaction between Smads and AR. (A) Co-immunoprecipitation of AR and Smad3. (B) PC-3(AR)2 cells that overexpress Flag-Smad3, Flag-Smad4 and AR were treated with and without DHT. Of 10 nM DHT to test for interaction domains of AR for Smad3 and Smad4. Complex bound to GST columns was subjected to SDS-PAGE and autoradiography. (B) GST-AR-LBD fusion proteins and GST control were incubated with in vitro transcribed/translated [³⁵S]-labeled Smad3 or Smad4 in the presence (+) or absence (−) of 10 nM DHT to test for interaction in the GST pull-down assay. (C) The indicated amounts of purified Smad4 proteins were added to fixed volume of in vitro transcribed/translated [³⁵S]-labeled full-length AR and 2 μg GST-Smad3 to test for interaction. Bands were detected using a phosphorimager. A representative blot of three independent experiments is shown.

[0034] 34. FIG. 28 shows the in vitro interaction between Smads and AR. (A) A series of [³⁵S]-labeled full-length AR and different AR deletion mutatnts were incubated with GST-Smad3, GST-Smad4 and GST alone in the presence (+) or absence (−) of 10 nM DHT to test for interaction domains of AR for Smad3 and Smad4. Complex bound to GST columns was subjected to SDS-PAGE and autoradiography. (B) GST-AR-LBD fusion proteins and GST control were incubated with in vitro transcribed/translated [³⁵S]-labeled Smad3 or Smad4 in the presence (+) or absence (−) of 10 nM DHT to test for interaction in the GST pull-down assay. (C) The indicated amounts of purified Smad4 proteins were added to fixed volumes of in vitro transcribed/translated [³⁵S]-labeled full-length AR and GST-Smad3 (2 μg) to test for interaction. Bands were detected using a phosphoimager. A representative blot of three independent experiments is shown.

[0035] 35. FIG. 29 shows an association of Smad3 and Smad4 with AR deacylation. (A) PC3-AR2 cells co-transfected with the MMTV-LUC reporter and the expression vector for the Smad3/Smad4 were treated with DHT in the presence of increasing doses of TSA. All values represent the mean±SD of three independent experiments. (B) Immunoprecipitation assays were performed with extracts from PC-3(AR)2 cells transfected with Smad3, Smad4, or Smad3/Smad4 expression vector in the presence (+) or absence (−) of 10⁻⁸ M DHT. Equal amounts of whole-cell lysates were subjected to co-immunoprecipitation with an anti-AR antibody. The co-immunoprecipitates were analyzed on Western blot with a specific anti-acetyl lysine antibody. Anti-AR or anti-flag was used in immunoblot analysis of the immunoprecipitated complexes to confirm that uniform amounts of AR and Smads were immunoprecipitated.

[0036] 36. FIG. 30 shows effects of Smad3 and Smad4 mutants on AR-mediated transcriptional activity. (A) The wtSmad4 and different Smad4 deletion mutants used are shown schematically. (B) PC-3 cells were co-transfected with 3 μg of Smad3, Smad4, Smad3ΔC or Smad4ΔC mutant expression vectors with 1 μg of pSG5-AR and 3 μg of MMTV-CAT, in the presence (+) or absence (−) of 10⁻⁸ M DHT. (C) Smad3 was co-expressed with different Smad4 deletion mutants as indicated in PC-3 cells. Each CAT activity is presented relative to the transactivation observed in the absence of DHT and an error bar represents the mean±SD of four independent experiments.

[0037] 37. FIG. 31 shows that an androgen-response element is important for TGF-β/Smad3-enhanced AR transactivation. (A) PC3-AR2, SW480·C7, and PC-3 cells were transiently co-transfected with either MMTV-CAT, PSA-CAT, 5XARE-CAT, or (TAT)2-CAT (3 μg), in the presence of AR, Smad3, Smad4 or Smad3/Smad4 as indicated. Each CAT activity is presented relative to the transactivation observed in the absence of Smad3. All values represent the mean±SD of three independent experiments.

[0038] 38. FIG. 32 shows a model for the roles of Smad3 and Smad4 in AR-mediated target genes transactivation.

### IV. DETAILED DESCRIPTION

[0039] 39. The present invention may be understood more readily by reference to the following detailed description of preferred embodiments of the invention and the Examples included therein and to the Figures and their previous and following description.

[0040] 40. Before the present compounds, compositions, articles, devices, and/or methods are disclosed and described, it is to be understood that this invention is not limited to specific synthetic methods, specific recombinant biotechnology methods unless otherwise specified, or to particular reagents unless otherwise specified, as such may, of course, vary. It is also to be understood that the terminology used herein is for the purpose of describing particular embodiments only and is not intended to be limiting.

[0041] A. Definitions

[0042] 41. As used in the specification and the appended claims, the singular forms “a,” “an” and “the” include plural referents unless the context clearly dictates otherwise. Thus, for example, reference to “a pharmaceutical carrier” includes mixtures of two or more such carriers, and the like.

[0043] 42. Ranges may be expressed herein as from “about” one particular value, and/or to “about” another particular value. When such a range is expressed, another embodiment includes from the one particular value and/or to the other particular value. Similarly, when values are expressed as approximations, by use of the antecedent “about,” it will be understood that the particular value forms another embodiment. It will be further understood that the endpoints of each of the ranges are significant both in relation to the other endpoint, and independently of the other endpoint. It is understood that any use of a value is also considered to be disclosed as “about” the particular value. For example, if the value is “10,” also disclosed is “about 10.”

[0044] 43. It also understood that a number of values are disclosed. It is understood that for all values or “at least,” “greater than or equal to,” “greater than,” “less than or equal to,” and “less than, ” the value are also disclosed. For example if the value “10” is disclosed, than at least 10,” “greater than or equal to 10,” “greater than 10,” “less than or equal to 10,” and “less than 10,” are also specifically disclosed.

[0045] 44. In this specification and in the claims which follow, reference will be made to a number of terms which shall be defined to have the following meanings:

[0046] 45. “Optional” or “optionally” means that the subsequently described event or circumstance may or may not occur, and that the description includes instances where said event or circumstance occurs and instances where it does not.

[0047] 46. The abbreviations used are: AR, androgen receptor; TGF-β, transforming growth factor β; MH2, Mad homology 2; wtAR, wild-type androgen receptor; mtAR, mutant AR; ARA, androgen receptor associated protein; ARE, androgen response element; DHT, 5α-dihydrotestosterone; HF, hydroxyflutamide; DBD, DNA-binding domain; LBD, ligand-binding domain; PSA, prostate specific antigen; MMTV, mouse mammary tumor virus; CAT, chloramphenicol acetyltransferase; GST, glutathione sepharose transferase; CT, threshold cycle; TSA, trichostatin A.

[0048] 47. Throughout this application, various publications are referenced. The disclosures of these publications in their entireties are hereby incorporated by reference into this application in order to more fully describe the state of the art to which this invention pertains. The references disclosed are also individually and specifically incorporated by reference herein for the material contained in them that is discussed in the sentence in which the reference is relied upon. Various references are listed by number in the specification. These references are also typically associated with a letter. That letter refers to the letter designation of a particular reference list included with this specification. For example, a designation “(1B)” would refer to reference 1 in list B. If the number designation is not associated with a particular number it will be clear to one of skill which reference is being referred to by the context the reference is relied upon and by a review of the various possible references. The examples all refer to a particular set of references, and thus do not have a letter designation associated with individual numbers.

[0049] 48. It will be apparent to those skilled in the art that various modifications and variations can be made in the present invention without departing from the scope or spirit of the invention. Other embodiments of the invention will be apparent to those skilled in the art from consideration of the specification and practice of the invention disclosed herein. It is intended that the specification and examples be considered as exemplary only, with a true scope and spirit of the invention being indicated by the following claims.

[0050] 49. Disclosed are the components to be used to prepare the disclosed compositions as well as the compositions themselves to be used within the methods disclosed herein. These and other materials are disclosed herein, and it is understood that when combinations, subsets, interactions, groups, etc. of these materials are disclosed that while specific reference of each various individual and collective combinations and permutation of these compounds may not be explicitly disclosed, each is specifically contemplated and described herein. For example, if a particular AR is disclosed and discussed and a number of modifications that can be made to a number of molecules including the AR are discussed, specifically contemplated is each and every combination and permutation of AR and the modifications that are possible unless specifically indicated to the contrary. Thus, if a class of molecules A, B, and C are disclosed as well as a class of molecules D, E, and F and an example of a combination molecule, A-D is disclosed, then even if each is not individually recited each is individually and collectively contemplated meaning combinations, A-B, A-F, B-D, B-E, B-F, C-D, C-E, and C-F are considered disclosed. Likewise, any subset or combination of these is also disclosed. Thus, for example, the sub-group of A-E, B-F, and C-E would be considered disclosed. This concept applies to all aspects of this application including, but not limited to, steps in methods of making and using the disclosed compositions. Thus, if there are a variety of additional steps that can be performed it is understood that each of these additional steps can be performed with any specific embodiment or combination of embodiments of the disclosed methods.

[0051] D. Compositions and Methods

[0052] 50. Disclosed are methods for modulating androgen receptor-mediated transactivation activity in a cell, comprising the step of: treating the cell with an agent that modulates the activity of a pathway from or to androgen receptor-androgen receptor coactivator interaction.

[0053] 51. Modulating means changing relative to a control. The control is based on what is being tested. For example, if one is modulating adrogen receptor transcription activity, then a control would be a standard androgen receptor transcription activity assay as described herein. As another example, if one were modulating PSA levels, then a control would be any standard PSA assay as described herein. Thus, some activity or some level, for example, are modulated if any change occurs in the activity or in the level relative to a control as described herein.

[0054] 52. It is also understood that there are levels of modulation that can occur when measuring any assay. For example, modulation can be at least a 1.5 fold, at least a 2 fold, at least a 2.5 fold, at least a 3 fold, at least a 3.5 fold, at least a 4 fold, at least a 4.5 fold, at least a 5 fold, at least a 6 fold, at least a 7 fold, at least a 8 fold, at least a 9 fold, at least at least a 10 fold, at least a 15 fold, at least a fold, at least a 25 fold, at least a 30 fold, at least a 50 fold, at least a 100 fold, at least a 500 fold, at least a 1000 fold difference between the control and the activity or substance, for example, being tested.

[0055] 53. Also disclosed are methods, wherein the agent modulates phosphatidylinositol 3-kinase activity, wherein the agent modulates Akt/PKB activity, wherein the agent is LY249002, wherein the agent is a constitutively active form of phosphatidylinositol 3-kinase, wherein the constitutively active form of phosphatidylinositol 3-kinase is p110, wherein the agent is a dominant negative form of phosphatidylinositol 3-kinase, wherein the dominant negative form of phosphatidylinositol 3-kinase is Δp85, wherein the agent is a constitutively active form of Akt/PKB, wherein the constitutively active form of Akt/PKB is cAkt, wherein the agent is a dominant negative form of Akt/PKB, and/or wherein the dominant negative form of Akt/PKB is dAkt.

[0056] 54. Also disclosed are methods for repressing androgen receptor-mediated transactivation activity in a cell, comprising the step of: treating the cell with IL-6 and a mitogen-activated protein kinase pathway inhibitor. It is understood that repressing is a fomr of modulation.

[0057] 55. Also disclosed are methods, wherein the mitogen-activated protein kinase pathway inhibitor is PD98059.

[0058] 56. Disclosed are methods for increasing androgen receptor-mediated transactivation activity in a cell, comprising the step of: treating the cell with an upstream androgen receptor activity pathway inhibitor. It is understood that increasing is a form of modulation.

[0059] 57. Also disclosed are methods, wherein the phosphatidylinositol 3-kinase pathway inhibitor is LY249002, wherein the phosphatidylinositol 3-kinase pathway inhibitor is a Akt/PKB inhibitor, and/or wherein the Akt/PKB inhibitor is dAkt.

[0060] 58. Disclosed are methods for screening a compound for use in treatment of androgen receptor-related diseases, comprising the step of determining the effect of the compound on one of the steps of the phosphatidylinositol 3-kinase pathway from and including phosphatidylinositol 3-kinase to and including androgen receptor-androgen receptor coactivator interaction. For example, the effect is a form of modulation.

[0061] 59. The step of determining can be performed using any assay for modulation, for example, such as an assay for determining androgen recpetor transcription activity, androgen receptor ligand binding, PSA levels, or tumor growth, for example.

[0062] 60. Also disclosed are methods, wherein the step of the phosphatidylinositol 3-kinase pathway is the phosphatidylinositol 3-kinase activation, wherein the step of the phosphatidylinositol 3-kinase pathway is the Akt/PKB activation, and/or wherein the step of the phosphatidylnositol 3-kinase pathway is androgen receptor serine 210 phosphorylation.

[0063] 61. Disclosed are methods for modulating androgen receptor-mediated transactivation activity in a cell, comprising the step of: treating the cell with an agent that modulates the activity of a signal transduction pathway involving androgen receptor.

[0064] 62. Also disclosed are methods, wherein the pathway is a Smad3 pathway, wherein the pathway is a Smad4 pathway, wherein the pathway is a Akt pathway, wherein the pathway is a PTEN pathway, wherein the pathway is a TGF-B pathway.

[0065] 63. Disclosed are methods for modulating androgen receptor-mediated transactivation activity in a cell, comprising the step of: treating the cell with an agent that inhibits the interaction between androgen receptor and a protein that modulates AR activation.

[0066] 64. Also disclosed are methods, wherein the protein is selected from the group consisting of Smad3, Smad4, Akt, PTEN, or TGF-B.

[0067] 65. Disclosed are methods of modulating AR activity comprising an administering an that agent binds directly to AR and inhibits AR activity.

[0068] 66. Also disclosed are methods, wherein the agent decreases AR activity and/or wherein the agent is PTEN.

[0069] 67. Disclosed are methods of identifying an agent that modulates AR activity through direct interaction comprising assaying the interaction through a glutothionine-S-transferase pull-down assay, mapping the domains of interaction GST pull-down assays using mutated forms of the agent or mapping the domains of interaction GST pull-down assays using mutated forms of AR, Smad3, Smad4, Akt, TGF-B, and PTEN or portions thereof, co-immunoprecipitating the agent and AR, and assaying the interaction via competition assays wherein the activity of the agent on AR is decreased through the presence of a competitive inhibitor comprising the binding domain of AR

[0070] 68. Disclosed are methods of detecting a effect of an agent on AR activity comprising assaying luciferase activity via the MMTV-luc reporter gene, wherein the cells used to measure the activity are LNCaP cells.

[0071] 69. Disclosed are methods of identifying a modulator of the PI3K/Akt to AR pathway comprising, assaying the effects on AR activity using MMTV-luc and (ARE)4-luc reporter genes and altering the effect of the modulator through the use of an agent.

[0072] 70. Disclosed are methods, wherein the agent is a constitutively active form of Akt, wherein the constitutively active form of Akt is cAkt, wherein the agent is a dominant negative form of Akt, wherein the dominant negative form of Akt is dAkt, wherein agent is an inhibitor of PI3K, wherein the inhibitor of PI3L is LY294002, wherein the agent is a constitutive active form of Akt, wherein the constitutively active form of Akt is cAkt, wherein the agent is a dominant negative form of Akt, wherein the dominant negative form of Akt is dAkt, wherein agent is an inhibitor of PI3K, wherein the inhibitor of PI3L is LY294002.

[0073] 71. Disclosed are methods of blocking apoptosis by inhibiting the interaction of PNET with AR through the use of an agent, wherein, for example, the agent is ARf.

[0074] 72. Disclosed are methods of identifying a compound that modulates androgen receptor activity comprising, a) administering a compound to a system, wherein the system has androgen receptor activity; b) assaying the effect of the compound on the amount of androgen receptor activity in the system; and c) selecting a compound which causes a change in the amount of androgen receptor activity in the system.

[0075] 73. Also disclosed are methods of modulating androgen receptor activity comprising administering a compound, wherein the compound causes modulation of androgen receptor activity, wherein the compound is defined as a compound capable of being identified by administering the compound to a system, wherein the system has androgen receptor activity; and assaying the effect of the compound on the amount of androgen receptor activity in the system; and selecting the compound if it causes a change in the amount of androgen receptor activity in the system.

[0076] 74. Also disclosed are methods of modulating androgen receptor activity comprising administering a compound that causes an inhibition or an increase of an interaction between androgen receptor and a protein selected from the group consisting of Smad3, Smad4, Akt, TGF-B, and PTEN or fragment thereof. An inhibition of an interaction means any decrease in the amount of the androgen receptor and the protein which are considered bound together. For example, a decrease of androgen receptor/protein interaction can be at least a 1.5 fold, at least a 2 fold, at least a 2.5 fold, at least a 3 fold, at least a 3.5 fold, at least a 4 fold, at least a 4.5 fold, at least a 5 fold, at least a 6 fold, at least a 7 fold, at least a 8 fold, at least a 9 fold, at least at least a 10 fold, at least a 15 fold, at least a 20 fold, at least a 25 fold, at least a 30 fold, at least a 50 fold, at least a 100 fold, at least a 500 fold, at least a 1000 fold increase in the observed K_{d} (dissociation constant) of the androgen receptor and the protein in the presence of the compound, for example. Likewise an increase of androgen receptor/protein interaction can be at least a 1.5 fold, at least a 2 fold, at least a 2.5 fold, at least a 3 fold, at least a 3.5 fold, at least a 4 fold, at least a 4.5 fold, at least a 5 fold, at least a 6 fold, at least a 7 fold, at least a 8 fold, at least a 9 fold, at least at least a 10 fold, at least a 15 fold, at least a 20 fold, at least a 25 fold, at least a 30 fold at least a 50 fold, at least a 100 fold, at least a 500 fold, at least a 1000 fold decrease in the observed K_{d} (dissociation constant) of the androgen receptor and the protein in the presence of the compound, for example.

[0077] 75. Disclosed are methods of making a composition capable of modulating androgen receptor activity comprising mixing an androgen receptor altering compound with a pharmaceutically acceptable carrier, wherein the compound is identified by administering the compound to a system, wherein the system has androgen receptor activity; and assaying the effect of the compound on the amount of androgen receptor activity in the system; and selecting the compound if it causes a change in the amount of androgen receptor activity in the system.

[0078] 76. A system is any combination of cells or reagents that allows for the tested activity. A system typically comprises components, such as proteins or nucleic acids expressing proteins, or immobilized proteins, or reagents. For example, a system could be a cell, wherein the cell expresses specific nucleic acids that encode specific proteins. In some embodiments, a system could also be an in vitro system comprising proteins, which may, for example, be immobilized. A system could also be an in vivo system, such as a mouse, which expresses a specific protein or set of proteins. Typically a system will be a cell system, wherein the cell comprises a specific combination of proteins. A system can also be a system wherein the components of the system are inducible. For example, in a cell system, various proteins, for example, AR and Smad3 may be expressed from inducible promoters. The promoters could be the same or different inducible promoter or both or one could be a constitutive promoter. The systems can comprise any of the compounds or reagents or molecules disclosed herein.

[0079] 77. Disclosed are methods of making a compound that modulates androgen receptor activity comprising, a) administering a compound to a system, wherein the system has androgen receptor activity; b) assaying the effect of the compound on the amount of androgen receptor activity in the system; and c) selecting a compound which causes a change in the amount of androgen receptor activity in the system, and d) synthesizing the compound.

[0080] 78. Disclosed are methods, wherein the change is at least a 1.5 fold, at least a 2 fold, at least a 2.5 fold, at least a 3 fold, at least a 3.5 fold, at least a 4 fold, at least a 4.5 fold, at least a 5 fold, at least a 6 fold, at least a 7 fold, at least a 8 fold, at least a 9 fold, at least at least a 10 fold, at least a 15 fold, at least a 20 fold, at least a 25 fold, at least a 30 fold, at least a 50 fold, at least a 100 fold, at least a 500 fold, at least a 1000 fold change.

[0081] 79. Disclosed are methods of modulating androgen receptor activity comprising administering a compound, wherein the compound is identified as changing the amount of androgen receptor activity in a system.

[0082] 80. Also disclosed are methods, wherein the change in the amount of androgen receptor activity is a decrease in the activity, wherein the change in the amount of androgen receptor activity is an increase in the activity, wherein the activity is the cellular proliferation activity of androgen receptor, wherein the activity is the apoptotic activity of androgen receptor, wherein the activity is the transcription activation activity of androgen receptor, wherein the activity is the PSA altering activity of androgen receptor, wherein the compound is a compound disclosed herein.

[0083] 81. Also disclosed are methods further comprising a protein which interacts with the androgen receptor, for example, wherein the protein is AR, Smad3, Smad4, TGFB, PTEN, and/or Akt.

[0084] 82. Disclosed are methods of identifying a modulator of an interaction between androgen receptor and Smad3 comprising a) administering a compound to a system, wherein the system comprises Smad3 and androgen receptor, b) assaying the effect of the compound on a Smad3-androgen receptor interaction, and c) selecting a compound which modulates the Smad3-androgen receptor interaction.

[0085] 83. Disclosed are methods of identifying a modulator of an interaction between androgen receptor and Smad4 comprising a) administering a compound to a system, wherein the system comprises Smad4 and androgen receptor, b) assaying the effect of the compound on a Smad4-androgen receptor interaction, and c) selecting a compound which modulates the Smad4-androgen receptor interaction.

[0086] 84. Disclosed are methods of identifying a modulator of an interaction between androgen receptor and Akt comprising a) administering a compound to a system, wherein the system comprises Akt and androgen receptor, b) assaying the effect of the compound on a Akt-androgen receptor interaction, and c) selecting a compound which modulates the Akt-androgen receptor interaction.

[0087] 85. Disclosed are methods of identifying a modulator of an interaction between androgen receptor and PTEN comprising a) administering a compound to a system, wherein the system comprises Smad3 and androgen receptor, b) assaying the effect of the compound on a PTEN-androgen receptor interaction, and c) selecting a compound which modulates the PTEN-androgen receptor interaction.

[0088] 86. Disclosed are methods wherein the modulator is an inhibitor and methods wherein the modulator is an enhancer.

[0089] 87. Disclosed are cells comprising, a) a regulatable nucleic acid comprising sequence encoding an AR gene and b) a nucleic acid comprising sequence encoding a Smad3 gene.

[0090] 88. Disclsoed are cells comprising, a) a regulatable nucleic acid comprising sequence encoding an AR gene and b) a nucleic acid comprising sequence encoding a Smad4 gene.

[0091] 89. Disclosed are cells comprising, a) a regulatable nucleic acid comprising sequence encoding an AR gene and b) a nucleic acid comprising sequence encoding a Akt gene.

[0092] 90. Also disclosed are cells comprising, a) a regulatable nucleic acid comprising sequence encoding an AR gene and b) a nucleic acid comprising sequence encoding a PTEN gene.

[0093] 91. Disclosed are cells comprising, a) a regulatable nucleic acid comprising sequence encoding an AR gene and b) a nucleic acid comprising sequence encoding a TGF-B gene.

[0094] 92. It is understood that cells that comprise at least one of the proteins disclosed herein, such as AR, Smad3, Smad4, TGF-B, PTEN, or Akt, or fragments or a combination of these proteins or fragments, are considered systems as disclosed herein. It is understood that these proteins can be expressed from transgenic nucleic acids or from native nucleic acids. It is also understood that in the systems, the nucleic acids expressing encoding the proteins may be regulatable or constitutive as described herein.

[0095] C. Compositions

[0096] 93. Disclosed are compositions and methods, which are related to androgen receptor signal transduction pathways. The disclosed pathways and interactions are involved in modulating androgen receptor effects on cells, such as prostate cells, and as disclosed herein can be modulated by the disclosed compositions. In general the compositions disclosed are compositions, which can modulate one or more of the signal transduction pathways related to androgen receptor. Also disclosed are various compositions involved in the signal transduction pathways related to androgen receptor, and these compositions are useful, for example, as targets in screening assays for modulators of androgen receptor pathways and functional effects.

[0097] 1. Androgen Receptor

[0098] AR is a phosphoprotein, and the consensus phosphorylation sites found in AR indicated that AR could be a substrate for the DNA-dependent protein kinase, protein kinase A (PKA), protein kinase C (PKC), mitogen-activated kinase (MAPK), and casein kinase II (Blok et al. (1996) Endocr Res 22, 197-219). This hypothesis was supported by the observation that PKA and PKC could enhance AR transactivation (Ikonen et al. (1994) Endocrinology 135, 1359-66; Nazareth et al. (1996) J Biol Chem 271, 19900-7). Furthermore, a report also demonstrated that the HER2/Neu-MAPK pathway could phosphorylate AR that might result in much easier recruitment of AR coregulators to AR. The consequence of this signal cascade may then enhance AR transactivation (Yeh et al. (1999) Proc Natl Acad Sci USA 96, 5458-63).

[0099] 94. In addition to stimulating cell growth, androgen/AR plays important roles in the promotion of cell apoptosis. For examples, androgen can induce the thymic atrophy by acceleration of thymocyte apoptosis (Olsen et al. (1998) Endocrinology 139, 748-52). Androgen also causes the biphasic growth (stimulation of cell growth at 10-12-10-10M and suppression of cell growth at 10-8M) in the prostate cancer LNCaP cells, which expresses functional AR (Zhao et al. (1999) Endocrinology 140, 1205-12). AR also plays indispensible roles in the mitogen-activated protein kinase kinase kinase-1 (MAPKKK1)-induced apoptosis in the prostate cancer cells (Abreu-Martin et al. (1999) Mol Cell Biol 19, 5143-54). Androgen also induces cell growth inhibition and apoptosis in the PC-3(AR)2 with stably transfected AR (Heisler et al. (1997) Mol Cell Endocrinol 126, 59-73). Finally, the tumor suppressor BRCA-1 increases the AR transactivation and promotes the androgen-induced cell death (Park et al. (2000) Cancer Res. 60, 5946-9; Yeh et al. (2000) Proc Natl Acad Sci USA 97, 11256-61). Taken together, it is well documented that androgen/AR may play dual roles in the promotion of cell growth and apoptosis.

[0100] 95. The androgen receptor (AR), a member of the steroid receptor superfamily, functions as an androgen-dependent transcriptional factor (Chang et al. (1988) Science 240, 324-326). After bindinig to ligand, the activated AR is able to recognize palindromic DNA sequences, called androgen response elements (AREs), and form a complex with AR associated proteins to induce the expression of AR target genes. Several AR coregulators (ARAs), such as ARA24, ARA54, ARA55, ARA70, ARA160, ARA267, Rb, BRCA1 and TIFIIH, have been isolated and characterize (Hsiao et al. (1999) J. Biol. Chem. 274, 22373-22379; Kang et al. (1999) J. Biol. Chem. 274, 8570-8576; Fujimoto et al. (1999) J. Biol. Chem. 274, 8316-8321; Yeh et al. (1996) Proc. Natl. Acad. Sci. USA 93, 5517-5521; Hsiao et al. (1999) J. Biol. Chem. 274,20229-20234; Yeh et al. (1998) Biochem. Biophys. Res. Commun. 248, 361-367; Yeh et al. (2000) Proc. Natl. Acad. Sci. USA 97, 11256-11261; Lee et al. (2000) J. Biol. Chem. 275, 9308-9313). Results from these studies suggest that coregulators not only can enhance AR transactivation, but may also be able to increase the agonist activity of antiandrogens (Miyamoto et al. (1998) Proc. Natl. Acad. Sci. USA 95, 7379-7384) and 17-β estradiol (Yeh et al. (1998) Proc. Natl. Acad. Sci. USA 95, 5527-5532:) in prostate cancer DU145 cells.

[0101] 96. Sequence analysis of AR reveals two Akt consensus sequences (RXRXXS/T) (Alessi et al. (1996) FEBS Lett 399, 333-8) located at its amino-terminal domain and caxboxyl-terminal domain (Ser210 (RAREAS) and Ser790 (RMRHLS)).

[0102] 97. Herein it is disclosed that Akt phosphorylates AR at Ser210, inhibits AR transactivation, and blocks AR-induced apoptosis.

[0103] 98. Disclosed herein both Smad3 and Smad4 can interact with AR in the DNA-binding domain (DBD) and the ligand-binding domain (LBD). Also disclosed Smad4 can decrease the AR-Smad3 interaction and repress the Smad3enhanced AR transactivation. These inhibitory functions of Smad3/Smad4 on AR transactivation in the prostate cancer cells indicate that Smad4 can cooperate with Smad3 to modulate AR transactivation.

[0104] 2. Phosphophatidylinositol 3(OH)-kinase (PI(3)K)

[0105] 99. Phosphophatidylinositol 3(OH)-kinase (PI(3)K) contains the p85 regulatory domain and p110 catalytic domain. The p85 regulatory domain possesses two src-homology 2 (SH2) domains and a src-homology 3 (SH3) domain. The major role of the SH2 domain is to facilitate tyrosine kinase-dependent regulation of PI(3)K activity by increasing the catalytic activity of p110 and by inducing the recruitment of PI(3)K to the signaling complex (Carpenter et al. (1996) Biochim Biophys Acta 1288, M11-6). PI(3)K phosphorylates the inositol ring of PI(4,5)P2 at the D-3 position to form PI(3,4,5) P3. This lipid product of PI(3)K then activates Akt/Protein kinase B (PKB) in the membrane.

[0106] 3. Akt/PKB

[0107] Akt/PKB, an oncoprotein, is a serine (Ser)-threonine (Thr) protein kinase. The amino terminus of Akt/PKB contains a pleckstrin homology domain, which could bind to the lipid products of PI(3)K (Franke et al. (1997) Cell 88,435-7). Phosphorylation of Akt/PKB at Thr308 and Ser473 results in full activation of Akt/PKB kinase activity (Chan, et al. (1999) Annu Rev Biochem 68, 965-1014). The PI(3)K/Akt pathway in diverse cell types provides the survival signal that involves several proapoptotic proteins such as Bad (Datta et al. (1997) Cell 91, 231-41; del Peso et al. (1997) Science 278, 687-9) and Caspase-9 (Cardone et al. (1998) Science 282, 1318-21).

[0108] 100. Data indicate that the role of Akt/PKB is to function as a general mediator of cell survival. Franke, T. F. et al., Cell 88,435-437 (1997). Several growth factors, such as insulin-like growth factor 1 and neurotrophins, may promote cell survival by activating the PI3K and its downstream target Akt/PKB. Akt/PKB may then phosphorylate and inhibit pro-apoptotic components, such as BAD, Caspase-9 and FKHRLI. Dana, S. R et al., Cell 91, 231-241 (1997); Cardone, M. H. et al., Science 282, 1318-1321 (1998); Brunet, A. et al., Cell 96, 857-868 (1999). Disclosed herein, Akt/PKB phosphorylates AR.

[0109] 101. Disclosed herein, Akt phosphorylates the androgen receptor (AR) at Ser210 and Ser790. A mutation at AR Ser210 results in the reversal of Akt-mediated suppression of AR transactivation. Activation of the phosphatidylinositol-3-OH kinase/Akt pathway results in the suppression of AR target genes, such as p21, and the decrease of androgen/AR-mediated apoptosis, through the inhibition of interaction between AR and AR coregulators. Disclosed is the molecular basis for cross-talk between two signaling pathways at the level of Akt and AR-AR coregulators.

[0110] 4. Interleukin-6 (“IL-6”)

[0111] 102. Interleukin-6 (“IL-6”) is a pleiotropic cytokine that has been associated with the growth of many tumor cells. Hobisch, A. et al., Cancer Res. 58, 4640-4645 (1998). Whether IL-6 stimulates or inhibits prostate cancer growth was controversial. Qui. Y. et al., Nature 393, 83-85 (1998); Hobisch, A et al., Cancer Res. 58, 4640-4645 (1998); Ritchie, C. K. et al., Endocrinology 138,1145-1150 (1997). Specific signaling events that link IL-6 to the androgen-AR signal transduction pathway is largely unexplored.

[0112] 103. IL-6 has two major signal cascades: mitogen-activated protein kinase (“MAPK”) and phosphatidylinositol 3-kinase (“PI3K”). Qui, Y. et al., Nature 393,83-85 (1998); Qui, Y. et al., Proc. Natl. Acad. Sci. USA 95, 3644-3649 (1998). With the MAPK cascade, IL-6 induces MAPK activation. Qui, Y. et al., Nature 393, 83-85 (1998). It has been shown that when MAPK is activated by overexpression of the HER2/Neu protooncogene, AR transactivation is increased. Yeh, S. et al., Proc. Natl. Acad. Sci. USA 96, (1999). With the PI3K cascade, IL-6 induces PI3K kinase activity. Qui, Y. et al., Proc. Natl. Acad. Sci. USA 95, 3644-3649 (1998). PI3K has two major downstream effectors: a serine/threonine kinase (“Akt/PKB”) and a ribosomal S6 kinase (“p70S6k”). Franke, T. F. et al., Cell 88,435-437 (1997).

[0113] 5. Transforming Growth Factor β (TGF-β)

[0114] 104. Transforming growth factor β (TGF-β) signaling is mediated through two types of transmembrane serine/theonine kinase receptors (Massague. (1996) Cell 85, 947-50). Upon binding to TGF-β, the type II TGF-β receptor (TβRII) forms a heteromeric complex with the type I TGF-β receptor (TβRI), resulting in the phosphorylation and activation of TβRI (Wrana et al. (1994) Nature 370, 341-7). The activated TβRI then interacts with an adaptor protein SARA (Smad anchor for receptor activation) (Tsukazaki et al. (1998) Cell 95, 779-91), which propagates signals to intracellular signaling mediators known as Smad2 and Smad3 (Derynck et al. (1998) Cell 95, 73740.). Following association with Smad4, the Smad complexes translocate to the nucleus where they activate specific target genes through cooperative interactions with DNA and other DNA-binding proteins such as FAST1 and Fos/Jun (AP-1) (Chen et al. (1996) Nature 383, 691-6; Zhang et al. (1998) Nature 394, 909-13).

[0115] TGF-β plays a dual role in tumorigenesis. On the one hand, TGF-β inhibits the growth of normal epithelial and endothelial cells (Massague (1990) Annu Rev Cell Biol 6, 597-641) and induces cell-cycle inhibitors such as p15^{INK4B} and p21 ^{WAF1/CIP} (Hannon et al. (1994) Nature 371, 257-61; Attisano et al. (1994) Biochim Biophys Acta 1222, 71-80). On the other hand, TGF-β can accelerate the malignant process during late stages of tumorigenesis (Barrack (1997) Prostate 31, 61-70; Cui et al. (1996) Cell 86, 531-42). TGF-β is abundantly expressed in various tumors of epithelial origin (Derynck et al. (1985) Nature 316, 701-5) in which it can suppress immune surveillance (Letterio et al. (1998) Annu Rev Immunol 16, 137-61), facilitate tumor invasion (Cui et al. (1996) Cell 86, 531-42), and promote the development of metastases (Yin et al. (1999) J Clin Invest 103, 197-206). The study of TGF-β expression indicates that it may be involved in the development of prostate cancer in animal models (Thompson et al. (1993) Cancer 71, 1165-71). Moreover, plasma TGF-β was significantly elevated in patients with clinically evident metastases and correlated with increasing serum prostate specific antigen (PSA) levels (Ivanovic et al. (1995) Nat Med 1, 282-4; Adler et al. (1999) J Urol 161, 182-7).

[0116] 105. Disclosed herein, Smad3, a downstream mediator of the TGF-β signaling pathway, functions as a coregulator to enhance androgen receptor (AR)-mediated transactivation. Aslo disclosed herein, as compared to wild type AR, Smad3 acts as a strong coregulator in the presence of 1 nM 5α-dihydrotestosterone, 10 nM 17β-estradiol, or 1 μM hydroxyflutamide for the LNCaP mutant AR (mtAR T877A), found in many prostate tumor patients. Aslo disclosed is that endogenous PSA expression in LNCaP cells can be induced by 5α-dihydrotestosterone and the addition of the Smad3 further induces PSA expression. Disclosed herein is that Smad3 is a coregulator for the androgen-signaling pathway as well as the involvement of TGF-β in the androgen-promoted prostate cancer growth.

[0117] 6. PTEN (Phosphatase and Tensin Homolog Deleted on Chromosome Ten)

[0118] 106. The tumor suppressor gene PTEN (phosphatase and tensin homolog deleted on chromosome ten), located at chromosome 10q23, is one of the most frequently mutated genes linked to a variety of human cancers (Li et al. (1997) Science 275, 1943-7; Davies et al. (1999) Cancer Res 59, 2551-6; Cantley et al. (1999) Proc Natl Acad Sci USA 96, 4240-5; Di Cristofano et al. (2000) Cell 100, 387-90; Feilotter et al. (1999) Br J Cancer 79, 718-23; Feilotter et al. (1998) Oncogene 16, 1743-8; Steck et al. (1997) Nat Genet 15, 356-62). Germline mutations in PTEN cause the autosomal dominant inherited cancer syndromes such as Cowden disease, which is associated with an elevated risk for malignant cancers (Liaw et al. (1997) Nat Genet 16, 64-7). Loss of PTEN expression is frequently found in prostate cancer cell lines and tumor specimens (Vlietstra et al. (1998) Cancer Res 58, 2720-3). Mice with a heterozygous mutant PEN develop prostate epithelial hyperplasia and dysplasia (Di Cristofano et al. (1998) Nat Genet 19, 348-55). Mice with inactivation of one allele of PTEN in combination with loss of the CDKn1b (encoding p27^{Kip1}) gene have an acceleration of spontaneous neoplastic transformation and develop prostate carcinoma (Di Cristofano et al. (2001) Nat Genet 27, 222-4). Interestingly, mice deficient in CDkn1b do not develop prostate cancer (Kiyokawa et al. (1996) Cell 85, 721-32; Fero et al. (1996) Cell 85, 733-44; Nakayama et al. (1996) Cell 85, 707-20), suggesting that PTEN and p27^{Kip1} cooperate in prostate cancer suppression in the mouse. These results indicate that loss of PTEN function may be a key event in prostate cancer progression.

[0119] 107. Recent studies demonstrated that PTEN regulates not only cell growth and apoptosis, but also controls cell adhesion, migration via regulating the focal adhesion kinase, and shc activity (Tamura et al. (1998) Science 280, 161-47; Tamura et al. (1999) J Natl Cancer Inst 91, 1820-8; Gu et al. (1999) J Cell Biol 146, 389-403). While the PTEN sequence suggests that it may be a dual specificity phosphatase, its protein substrates remain largely unknown. Recently, several groups have reported that the phosphatidylinositol-3-OH kinase (PI3K)/Akt pathway is negatively regulated by PTEN through its phospholipid 3-phosphatase activity (Cantley et al. (1999) Proc Natl Acad Sci USA 96, 4240-5; Di Cristofano et al. (2000) Cell 100, 387-90; Maehama et al. (1998) J Biol Chem 273, 13375-8; Maehama et al. (1999) Trends Cell Biol 9, 125-8; Hopkin, K. (1998) Science 282, 1027,1029 -30). The PI3K/Akt-dependent pathway is the most popular model for PTEN action, however, signaling pathways other than PI3K/Akt are also suggested (Gao et al. (2000) Dev Biol 221, 404-18).

[0120] 108. Disclosed herein AR interacts with the phosphatase domain of PTEN. Also disclosed herein, interaction between PTEN and AR promotes AR protein degradation that results in the suppression of AR transactivation and induction of apoptosis. Also disclosed is a minimum interaction peptide within AR (aa, 483-651) disrupts the interaction of PTEN with AR and reduces PTEN effect on AR transactivation and apoptosis. In addition, the phosphatase domain within PTEN can mimic the effects of PTEN on the suppression of AR activity. Also disclosed, the interactions between PTEN and AR contribute to PTEN-induced suppression of AR functions and apoptosis.

[0121] 7. Smads

[0122] 109. Smads are a class of proteins that function as central mediators of the transforming growth factor β (TGF-β) superfamily (Derynck et al. (1998) Cell 95,737-740; Massagué (1998) Ann. Rev. of Biochem. 67, 753-791). Smads are directly phosphorylated and activated by type I TGF-β family receptors (Zhang et al. (1996) Nature 383, 168-72; Macias-Silva et al. (1996) Cell 87, 1215-1224). TGF-β and activin receptors phosphorylate Smad2 and Smad3 (Zhang et al. (1996) Nature 383, 168-72; Nakao et al. (1997) Embo. J. 16, 5353-5362), whereas bone morphogenetic protein receptors phosphorylate Smads 1, 5, and 8 (Liu et al. (1996) Nature 381, 620-623; Graff et al. (1996) Cell 85, 479-487; Hoodless et al. (1996) Cell 85, 489-500). Upon phosphorylation, these Smads will associate with Smad4 and move into the nucleus where they assemble transcriptional complexes that activate specific sets of genes. Thus, Smad4 is a shared key component of these various signaling pathways. A distinct structural feature that distinguishes Smad4 from other Smads is the lack of the SSXS motif at the tail of the Mad homology 2 (MH2) domain terminal that can be phosphorylated by the cognate receptor kinases (Zhang et al. (1996) Nature 383, 168-72; Macias-Silva et al. (1996) Cell 87, 1215-1224; Kretzschmar et al. (1997) Genes Dev. 11, 984-995; Liu et al. (1997) Proc. Natl. Acad. Sci. USA 94, 10669-10674).

[0123] 110. Smad4 was originally identified as a candidate tumor suppressor gene in chromosome 18q21 that was somatically deleted/mutated/inactivated in many pancreatic or colorectal tumors (Hahn et al. (1996) Science 271, 350-3; Howe et al. (1998) Science 280, 1086-1088; Thiagalingam et al. (1996) Nat. Genet. 13, 343-346). Knock-out smad4studies indicated that the Smad4-null mouse has early embryonic lethality (Takaku et al. (1998) Cell 92, 645-656; Sirard et al. (1998) Genes Dev. 12, 107-119). The introduction of the Smad4 gene into Smad4-null cells also suggested that the wild type (wt) Smad4 could decrease the cell growth rate, cause a cell cycle arrest, and induce apoptosis (Dai et al. (1999) Proc. Natl. Acad. Sci. USA 96, 1427-1432).

[0124] 111. Although Smad4 has been reported to be infrequently mutated or deleted in breast (Schutte et al. (1996) Cancer Res. 56, 2527-2530), ovarian (Schutte et al. (1996) Cancer Res. 56, 2527-2530), and prostate cancers (MacGrogan et al. (1997) Oncogene 15, 1111-1114), a significant increase of Smad4 was observed in the normal ventral prostate, as well as in the prostate tumors after castration. Moreover, a previous report has shown that the stining for Smad4 was present in areas with a large number of apoptotic cells in the prostate after castration (Brodin et al. (1999) Cancer Res. 59, 2731-2738). Smad4 proteins have been found to functionally interact with Smad3 (Zhang et al. (1996) Nature 383, 168-72), AP-1 (Zhang et al. (1998) Nature 394, 909-913), and p300/CBP (Feng et al. (1998) Genes Dev. 12, 2153-2163), it is possible that Smad4 may also play an important role in the modulation of the androgen-mediated signal pathway.

[0125] 112. Disclosed herein the Smad4, together with Smad3, and each individually, can interact with the androgen receptor (AR) in the DNA-binding and ligand-binding domains, which results in the modulation of 5α-dihydrotestosterone-induced AR transactivation. Disclosed herein in prostate PC-3 and LNCaP cells, addition of Smad3 alone can induce AR transactivation and co-transfection of Smad3/Smad4 can then repress AR transactivation in various androgen response element-promoter reporter assays as well as Northern blot and RT-PCR quantitation assays with prostate specific antigen mRNA expression. In contrast, in the SW480·C7 cells, without an endogenous functional Smad4, the influence of Smad3 on AR transactivation is dependent on the various androgen response element-promoters. Disclosed herein, the Smad3/Smad4 influence on AR transactivation involves acetylation since treatment of trichostatin A or NaB can reverse Smad3/Smad4-repressed AR transactivation and the Smad3/Smad4 complex can also decrease the acetylation level of AR. Disclosed herein, homodimers or heterodimers between Smad3 and Smad4, as well as their interactions with AR, result in the differential regulation of AR transactivation.

[0126] 8. Sequence Similarities

[0127] 113. It is understood that as discussed herein the use of the terms homology and identity mean the same thing as similarity. Thus, for example, if the use of the word homology is used between two non-natural sequences it is understood that this is not necessarily indicating an evolutionary relationship between these two sequences, but rather is looking at the similarity or relatedness between their nucleic acid sequences. Many of the methods for determining homology between two evolutionarily related molecules are routinely applied to any two or more nucleic acids or proteins for the purpose of measuring sequence similarity regardless of whether they are evolutionarily related or not.

[0128] 114. In general, it is understood that one way to define any known variants and derivatives or those that might arise, of the disclosed genes and proteins herein, is through defining the variants and derivatives in terms of homology to specific known sequences. This identity of particular sequences disclosed herein is also discussed elsewhere herein. In general, variants of genes and proteins herein disclosed typically have at least, about 70, 71, 72, 73, 74, 75, 76, 77, 78, 79, 80, 81, 82, 83, 84, 85, 86, 87, 88, 89, 90, 91, 92, 93, 94, 95, 96, 97, 98, or 99 percent homology to the stated sequence or the native sequence. Those of skill in the art readily understand how to determine the homology of two proteins or nucleic acids, such as genes. For example, the homology can be calculated after aligning the two sequences so that the homology is at its highest level.

[0129] 115. Another way of calculating homology can be performed by published algorithms. Optimal alignment of sequences for comparison may be conducted by the local homology algorithm of Smith and Waterman Adv. Appl. Math. 2: 482 (1981), by the homology alignment algorithm of Needleman and Wunsch, J. MoL BioL 48: 443 (1970), by the search for similarity method of Pearson and Lipman, Proc. Natl. Acad. Sci. U.S.A. 85: 2444 (1988), by computerized implementations of these algorithms (GAP, BESTFIT, FASTA, and TFASTA in the Wisconsin Genetics Software Package, Genetics Computer Group, 575 Science Dr., Madison, Wis.), or by inspection.

[0130] 116. The same types of homology can be obtained for nucleic acids by for example the algorithms disclosed in Zuker, M. Science 244:48-52, 1989, Jaeger et al. Proc. Natl. Acad. Sci. USA 86:7706-7710, 1989, Jaeger et al. Methods Enzymol. 183:281-306, 1989 which are herein incorporated by reference for at least material related to nucleic acid alignment. It is understood that any of the methods typically can be used and that in certain instances the results of these various methods may differ, but the skilled artisan understands if identity is found with at least one of these methods, the sequences would be said to have the stated identity, and be disclosed herein.

[0131] 117. For example, as used herein, a sequence recited as having a particular percent homology to another sequence refers to sequences that have the recited homology as calculated by any one or more of the calculation methods described above. For example, a first sequence has 80 percent homology, as defined herein, to a second sequence if the first sequence is calculated to have 80 percent homology to the second sequence using the Zuker calculation method even if the first sequence does not have 80 percent homology to the second sequence as calculated by any of the other calculation methods. As another example, a first sequence has 80 percent homology, as defined herein, to a second sequence if the first sequence is calculated to have 80 percent homology to the second sequence using both the Zuker calculation method and the Pearson and Lipman calculation method even if the first sequence does not have 80 percent homology to the second sequence as calculated by the Smith and Waterman calculation method, the Needleman and Wunsch calculation method, the Jaeger calculation methods, or any of the other calculation methods. As yet another example, a first sequence has 80 percent homology, as defined herein, to a second sequence if the first sequence is calculated to have 80 percent homology to the second sequence using each of calculation methods (although, in practice, the different calculation methods will often result in different calculated homology percentages).

[0132] 9. Hybridization/selective Hybridization

[0133] 118. The term hybridization typically means a sequence driven interaction between at least two nucleic acid molecules, such as a primer or a probe and a gene. Sequence driven interaction means an interaction that occurs between two nucleotides or nucleotide analogs or nucleotide derivatives in a nucleotide specific manner. For example, G interacting with C or A interacting with T are sequence driven interactions. Typically sequence driven interactions occur on the Watson-Crick face or Hoogsteen face of the nucleotide. The hybridization of two nucleic acids is affected by a number of conditions and parameters known to those of skill in the art. For example, the salt concentrations, pH, and temperature of the reaction all affect whether two nucleic acid molecules will hybridize.

[0134] 119. Parameters for selective hybridization between two nucleic acid molecules are well known to those of skill in the art. For example, in some embodiments selective hybridization conditions can be defined as stringent hybridization conditions. For example, stringency of hybridization is controlled by both temperature and salt concentration of either or both of the hybridization and washing steps. For example, t,he conditions of hybridization to achieve selective hybridization may involve hybridization in high ionic strength solution (6×SSC or 6×SSPE) at a temperature that is about 12-25° C. below the Tm (the melting temperature at which half of the molecules dissociate from their hybridization partners) followed by washing at a combination of temperature and salt concentration chosen so that the washing temperature is about 5° C. to 20° C. below the Tm. The temperature and salt conditions are readily determined empirically in preliminary experiments in which samples of reference DNA immobilized on filters are hybridized to a labeled nucleic acid of interest and then washed under conditions of different stringencies. Hybridization temperatures are typically higher for DNA-RNA and RNA-RNA hybridizations. The conditions can be used as described above to achieve stringency, or as is known in the art. (Sambrook et al., Molecular Cloning: A Laboratory Manual, 2nd Ed., Cold Spring Harbor Laboratory, Cold Spring Harbor, N.Y., 1989; Kunkel et al. Methods Enzymol. 1987:154:367, 1987 which is herein incorporated by reference for material at least related to hybridization of nucleic acids). A preferable stringent hybridization condition for a DNA:DNA hybridization can be at about 68° C. (in aqueous solution) in 6×SSC or 6×SSPE followed by washing at 68° C. Stringency of hybridization and washing, if desired, can be reduced accordingly as the degree of complementarity desired is decreased, and further, depending upon the G-C or A-T richness of any area wherein variability is searched for. Likewise, stringency of hybridization and washing, if desired, can be increased accordingly as homology desired is increased, and further, depending upon the G-C or A-T richness of any area wherein high homology is desired, all as known in the art.

[0135] 120. Another way to define selective hybridization is by looking at the amount (percentage) of one of the nucleic acids bound to the other nucleic acid. For example, in some embodiments selective hybridization conditions would be when at least about, 60, 65, 70, 71, 72, 73, 74, 75, 76, 77, 78, 79, 80, 81, 82, 83, 84, 85, 86, 87, 88, 89, 90, 91, 92, 93, 94, 95, 96, 97, 98, 99, 100 percent of the limiting nucleic acid is bound to the non-limiting nucleic acid. Typically, the non-limiting primer is in for example, 10 or 100 or 1000 fold excess. This type of assay can be performed at under conditions where both the limiting and non-limiting primer are for example, 10 fold or 100 fold or 1000 fold below their k_{d}, or where only one of the nucleic acid molecules is 10 fold or 100 fold or 1000 fold or where one or both nucleic acid molecules are above their k_{d}.

[0136] 121. Another way to define selective hybridization is by looking at the percentage of primer that gets enzymatically manipulated under conditions where hybridization is required to promote the desired enzymatic manipulation. For example, in some embodiments selective hybridization conditions would be when at least about, 60, 65, 70, 71, 72, 73, 74, 75,76, 77, 78, 79, 80, 81, 82, 83, 84, 85, 86, 87, 88, 89, 90, 91, 92, 93, 94, 95, 96, 97, 98, 99, 100 percent of the primer is enzymatically manipulated under conditions which promote the enzymatic manipulation, for example if the enzymatic manipulation is DNA extension, then selective hybridization conditions would be when at least about 60, 65, 70, 71, 72, 73, 74, 75, 76, 77, 78, 79, 80, 81, 82, 83, 84, 85, 86, 87, 88, 89, 90, 91, 92, 93, 94, 95, 96, 97, 98, 99, 100 percent of the pruner molecules are extended. Preferred conditions also include those suggested by the manufacturer or indicated in the art as being appropriate for the enzyme performing the manipulation.

[0137] 122. Just as with homology, it is understood that there are a variety of methods herein disclosed for determining the level of hybridization between two nucleic acid molecules. It is understood that these methods and conditions may provide different percentages of hybridization between two nucleic acid molecules, but unless otherwise indicated meeting the parameters of any of the methods would be sufficient. For example if 80% hybridization was required and as long as hybridization occurs within the required parameters in any one of these methods it is considered disclosed herein.

[0138] 123. It is understood that those of skill in the art understand that if a composition or method meets any one of these criteria for determining hybridization either collectively or singly it is a composition or method that is disclosed herein.

[0139] 10. Nucleic Acids

[0140] 124. There are a variety of molecules disclosed herein that are nucleic acid based, including for example the nucleic acids that encode, for example AR, Smad3, Smad4, TGF-B, Akt, IL-6, and PTEN, or fragments thereof, as well as various functional nucleic acids. The disclosed nucleic acids are made up of for example, nucleotides, nucleotide analogs, or nucleotide substitutes. Non-limiting examples of these and other molecules are discussed herein. It is understood that for example, when a vector is expressed in a cell, that the expressed mRNA will typically be made up of A, C, G, and U. Likewise, it is understood that if, for example, an antisense molecule is introduced into a cell or cell environment through for example exogenous delivery, it is advantagous that the antisense molecule be made up of nucleotide analogs that reduce the degradation of the antisense molecule in the cellular environment.

[0141] a) Nucleotides and Related Molecules

[0142] 125. A nucleotide is a molecule that contains a base moiety, a sugar moiety and a phosphate moiety. Nucleotides can be linked together through their phosphate moieties and sugar moieties creating an internucleoside linkage. The base moiety of a nucleotide can be adenin-9-yl (A), cytosin-1-yl (C), guanin-9-yl (G), uracil-1-yl (U), and thymin-1-yl (T). The sugar moiety of a nucleotide is a ribose or a deoxyribose. The phosphate moiety of a nucleotide is pentavalent phosphate. An non-limiting example of a nucleotide would be 3′-AMP (3′-adenosine monophosphate) or 5′-GMP (5′-guanosine monophosphate). There are many varieties of these types of molecules available in the art and available herein.

[0143] 126. A nucleotide analog is a nucleotide which contains some type of modification to either the base, sugar, or phosphate moieties. Modifications to nucleotides are well known in the art and would include for example, 5-methylcytosine (5-me-C), 5-hydroxymethyl cytosine, xanthine, hypoxanthine, and 2-aminoadenine as well as modifications at the sugar or phosphate moieties. There are many varieties of these types of molecules available in the art and available herein.

[0144] 127. Nucleotide substitutes are molecules having similar functional properties to nucleotides, but which do not contain a phosphate moiety, such as peptide nucleic acid (PNA). Nucleotide substitutes are molecules that will recognize nucleic acids in a Watson-Crick or Hoogsteen manner, but which are linked together through a moiety other than a phosphate moiety. Nucleotide substitutes are able to conform to a double helix type structure when interacting with the appropriate target nucleic acid. There are many varieties of these types of molecules available in the art and available herein.

[0145] 128. It is also possible to link other types of molecules (conjugates) to nucleotides or nucleotide analogs to enhance for example, cellular uptake. Conjugates can be chemically linked to the nucleotide or nucleotide analogs. Such conjugates include but are not limited to lipid moieties such as a cholesterol moiety. (Letsinger et al., Proc. Natl. Acad. Sci. USA, 1989,86, 6553-6556). There are many varieties of these types of molecules available in the art and available herein.

[0146] 129. A Watson-Crick interaction is at least one interaction with the Watson-Crick face of a nucleotide, nucleotide analog, or nucleotide substitute. The Watson-Crick face of a nucleotide, nucleotide analog, or nucleotide substitute includes the C2, N1, and C6 positions of a purine based nucleotide, nucleotide analog, or nucleotide substitute and the C2, N3, C4 positions of a pyrimidine based nucleotide, nucleotide analog, or nucleotide substitute.

[0147] 130. A Hoogsteen interaction is the interaction that takes place on the Hoogsteen face of a nucleotide or nucleotide analog, which is exposed in the major groove of duplex DNA. The Hoogsteen face includes the N7 position and reactive groups (NH2 or O) at the C6 position of purine nucleotides.

[0148] b) Sequences

[0149] 131. There are a variety of sequences related to the protein molecules involved in the signaling pathways disclosed herein, for example, AR, Smad3, Smad4, TGF-B, Akt, IL-6, and PTEN, all of which are encoded by nucleic acids. The sequences for the human analogs of these genes, as well as other anlogs, and alleles of these genes, and splice variants and other types of variants, are available in a variety of protein and gene databases, including Genbank (for example Genbank accession numbers NM_{—}000044 (SEQ ID NO: 1), L49399 (SEQ ID NO: 2), AH011390 (SEQ ID NO: 3), SEG_AB004922S (SEQ ID NO: 4), AB043547 (SEQ ID NO: 5), E00973 (SEQ ID NO: 6), XM_{—}081482 (SEQ ID NO: 7), AH007803 (SEQ ID NO: 8), AH005966 (SEQ ID NO: 9), AF067844 (SEQ ID NO: 10), and AF372214 (SEQ ID NO: 11)). Those sequences available at the time of filing this application at Genbank are herein incorporated by reference in their entireties as well as for individual subsequences contained therein Genbank can be accessed at http://www.ncbi.nih.gov/entrez/guery.fcgi. Those of skill in the art understand how to resolve sequence discrepancies and differences and to adjust the compositions and methods relating to a particular sequence to other related sequences. Primers and/or probes can be designed for any given sequence given the information disclosed herein and known in the art.

[0150] c) Primers and Probes

[0151] 132. Disclosed are compositions including primers and probes, which are capable of interacting with the genes of the disclosed proteins as disclosed herein. In certain embodiments the primers are used to support DNA amplification reactions. Typically the primers will be capable of being extended in a sequence specific manner. Extension of a primer in a sequence specific manner includes any methods wherein the sequence and/or composition of the nucleic acid molecule to which the primer is hybridized or otherwise associated directs or influences the composition or sequence of the product produced by the extension of the primer. Extension of the primer in a sequence specific manner therefore includes, but is not limited to, PCR, DNA sequencing, DNA extension, DNA polymerization, RNA transcription, or reverse transcription Techniques and conditions that amplify the primer in a sequence specific manner are preferred. In certain embodiments the primers are used for the DNA amplification reactions, such as PCR or direct sequencing. It is understood that in certain embodiments the primers can also be extended using non enzymatic techniques, where for example, the nucleotides or oligonucleotides used to extend the primer are modified such that they will chemically react to extend the primer in a sequence specific manner. Typically the disclosed primers hybridize with the gene or region of the gene or they hybridize with the complement of the gene or complement of a region of the gene. The size of the primers or probes can be any size that supports the desired enzymatic manipulation of the primer, such as DNA amplification o rthe simple hybridization of the probe or primer. The products produced by enzymatic reactions dependent on the primers can be any size, but typically would be less than 4000 bases long.

[0152] d) Functional Nucleic Acids

[0153] 133. Functional nucleic acids are nucleic acid molecules that have a specific function, such as binding a target molecule or catalyzing a specific reaction. Functional nucleic acid molecules can be divided into the following categories, which are not meant to be limiting. For example, functional nucleic acids include antisense molecules, aptamers, ribozymes, triplex forming molecules, and external guide sequences. The functional nucleic acid molecules can act as affectors, inhibitors, modulators, and stimulators of a specific activity possessed by a target molecule, or the functional nucleic acid molecules can possess a de novo activity independent of any other molecules.

[0154] 134. Functional nucleic acid molecules can interact with any macromolecule, such as DNA, RNA, polypeptides, or carbohydrate chains. Thus, functional nucleic acids can interact with the mRNA of the disclosed polypeptides, such as AR, Smad3, Smad4, TGF-B, Akt, IL-6, and PTEN, or the genomic DNA of the disclosed polypeptides, such as AR, Smad3, Smad4, TGF-B, Akt, IL-6, and PTEN, or they can interact with the polypeptides themselves, such as AR, Smad3, Smad4, TGF-B, Akt, IL-6, and PTEN. Also disclosed are molecules that interact with fragments, such as functional or antigeneic fragments of the disclosed molecules, such as AR, Smad3, Smad4, TGF-B, Akt, IL-6, and PTEN Often functional nucleic acids are designed to interact with other nucleic acids based on sequence homology between the target molecule and the functional nucleic acid molecule. In other situations, the specific recognition between the functional nucleic acid molecule and the target molecule is not based on sequence homology between the functional nucleic acid molecule and the target molecule, but rather is based on the formation of tertiary structure that allows specific recognition to take place.

[0155] 135. Antisense molecules are designed to interact with a target nucleic acid molecule through either canonical or non-canonical base pairing. The interaction of the antisense molecule and the target molecule is designed to promote the destruction of the target molecule through, for example, RNAseH mediated RNA-DNA hybrid degradation. Alternatively the antisense molecule is designed to interrupt a processing function that normally would take place on the target molecule, such as transcription or replication. Antisense molecules can be designed based on the sequence of the target molecule. Numerous methods for optimization of antisense efficiency by finding the most accessible regions of the target molecule exist. Exemplary methods would be in vitro selection experiments and DNA modification studies using DMS and DEPC. It is preferred that antisense molecules bind the target molecule with a dissociation constant (k_{d})less than 10⁻⁶. It is more preferred that antisense molecules bind with a k_{d} less than 10⁻⁸. It is also more preferred that the antisense molecules bind the target moelcule with a k_{d} less than 10⁻¹⁰. It is also preferred that the antisense molecules bind the target molecule with a k_{d} less than 10⁻¹². A representative sample of methods and techniques which aid in the design and use of antisense molecules can be found in the following non-limiting list of U.S. Pat. Nos.: 5,135,917, 5,294,533, 5,627,158, 5,641,754, 5,691,317, 5,780,607, 5,786,138, 5,849,903, 5,856,103, 5,919,772, 5,955,590, 5,990,088, 5,994,320, 5,998,602, 6,005,095, 6,007,995, 6,013,522, 6,017,898, 6,018,042, 6,025,198, 6,033,910, 6,040,296, 6,046,004, 6,046,319, and 6,057,437.

[0156] 136. Aptamers are molecules that interact with a target molecule, preferably in a specific way. Typically aptamers are small nucleic acids ranging from 15-50 bases in length that fold into defined secondary and tertiary structures, such as stem-loops or G-quartets. Aptamers can bind small molecules, such as ATP (U.S. Pat. No. 5,631,146) and theophiline (U.S. Pat. No. 5,580,737), as well as large molecules, such as reverse transcriptase (U.S. Pat. No. 5,786,462) and thrombin (U.S. Pat. No. 5,543,293). Aptamers can bind very tightly with k_{d}s from the target molecule of less than 10⁻¹² M. It is preferred that the aptamers bind the target molecule with a k_{d} less than 10⁻⁶. It is more preferred that the aptamers bind the target molecule with a k_{d} less than 10⁻⁸. It is also more preferred that the aptamers bind the target molecule with a k_{d} less than 10⁻¹⁰. It is also preferred that the aptamers bind the target molecule with a k_{d} less than 10⁻¹². Aptamers can bind the target molecule with a very high degree of specificity. For example, aptamers have been isolated that have greater than a 10000 fold difference in binding affinities between the target molecule and another molecule that differ at only a single position on the molecule (U.S. Pat. No. 5,543,293). It is preferred that the aptamer have a k_{d} with the target molecule at least 10 fold lower than the k_{d} with a background binding molecule. It is more preferred that the aptamer have a k_{d} with the target molecule at least 100 fold lower than the k_{d} with a background binding molecule. It is more preferred that the aptamer have a k_{d} with the target molecule at least 1000 fold lower than the k_{d} with a background binding molecule. It is preferred that the aptamer have a k_{d} with the target molecule at least 10000 fold lower than the k_{d} with a background binding molecule. It is preferred when doing the comparison for a polypeptide for example, that the background molecule be a different polypeptide. For example, when determining the specificity of aptamers polypeptides, such as AR, Smad3, Smad4, TGF-B, Akt, IL-6, and PTEN, the background protein could be serum albumin. Representative examples of how to make and use aptamers to bind a variety of different target molecules can be found in the following non-limiting list of U.S. Pat. Nos.: 5,476,766, 5,503,978, 5,631,146, 5,731,424, 5,780,228, 5,792,613, 5,795,721, 5,846,713, 5,858,660, 5,861,254, 5,864,026, 5,869,641, 5,958,691, 6,001,988, 6,011,020, 6,013,443, 6,020,130, 6,028,186, 6,030,776, and 6,051,698.

[0157] 137. Ribozymes are nucleic acid molecules that are capable of catalyzing a chemical reaction, either intramolecularly or intermolecularly. Ribozymes are thus catalytic nucleic acid. It is preferred that the ribozymes catalyze intermolecular reactions. There are a number of different types of ribozymes that catalyze nuclease or nucleic acid polymerase type reactions which are based on ribozymes found in natural systems, such as hammerhead ribozymes, (for example, but not limited to the following U.S. Pat. Nos.: 5,334,711, 5,436,330, 5,616,466, 5,633,133, 5,646,020, 5,652,094, 5,712,384, 5,770,715, 5,856,463, 5,861,288, 5,891,683, 5,891,684, 5,985,621, 5,989,908, 5,998,193, 5,998,203, WO 9858058 by Ludwig and Sproat, WO 9858057 by Ludwig and Sproat, and WO 9718312 by Ludwig and Sproat) hairpin ribozymes (for example, but not limited to the following U.S. Pat. Nos.: 5,631,115, 5,646,031, 5,683,902, 5,712,384, 5,856,188, 5,866,701, 5,869,339, and 6,022,962), and tetrahymena ribozymes (for example, but not limited to the following U.S. Pat. Nos.: 5,595,873 and 5,652,107). There are also a number of ribozymes that are not found in natural systems, but which have been engineered to catalyze specific reactions de novo (for example, but not limited to the following U.S. Pat. Nos.: 5,580,967, 5,688,670, 5,807,718, and 5,910,408). Preferred ribozymes cleave RNA or DNA substrates, and more preferably cleave RNA substrates. Ribozymes typically cleave nucleic acid substrates through recognition and binding of the target substrate with subsequent cleavage. This recognition is often based mostly on canonical or non-canonical base pair interactions. This property makes ribozymes particularly good candidates for target specific cleavage of nucleic acids because recognition of the target substrate is based on the target substrates sequence. Representative examples of how to make and use ribozymes to catalyze a variety of different reactions can be found in the following non-limiting list of U.S. Pat. Nos.: 5,646,042, 5,693,535, 5,731,295, 5,811,300, 5,837,855, 5,869,253, 5,877,021, 5,877,022, 5,972,699, 5,972,704, 5,989,906, and 6,017,756.

[0158] 138. Triplex forming functional nucleic acid molecules are molecules that can interact with either double-stranded or single-stranded nucleic acid. When triplex molecules interact with a target region, a structure called a triplex is formed, in which there are three strands of DNA forming a complex dependant on both Watson-Crick and Hoogsteen base-pairing. Triplex molecules are preferred because they can bind target regions with high affinity and specificity. It is preferred that the triplex forming molecules bind the target molecule with a k_{d} less than 10⁻⁶. It is more preferred that the triplex forming molecules bind with a k_{d} less than 10⁻⁸. It is also more preferred that the triplex forming molecules bind the target moelcule with a k_{d} less than 10⁻¹⁰. It is also preferred that the triplex forming molecules bind the target molecule with a k_{d} less than 10⁻¹². Representative examples of how to make and use triplex forming molecules to bind a variety of different target molecules can be found in the following non-limiting list of U.S. Pat. Nos.: 5,176,996, 5,645,985, 5,650,316, 5,683,874, 5,693,773, 5,834,185, 5,869,246, 5,874,566, and 5,962,426.

[0159] 139. External guide sequences (EGSs) are molecules that bind a target nucleic acid molecule forming a complex, and this complex is recognized by RNase P, which cleaves the target molecule. EGSs can be designed to specifically target a RNA molecule of choice. RNAse P aids in processing transfer RNA (tRNA) within a cell. Bacterial RNAse P can be recruited to cleave virtually any RNA sequence by using an EGS that causes the target RNA:EGS complex to mimic the natural tRNA substrate. (WO 92/03566 by Yale, and FoFster and Altman, Science 238:407-409 (1990)).

[0160] 140. Similarly, eukaryotic EGS/RNAse P-directed cleavage of RNA can be utilized to cleave desired targets within eukarotic cells. (Yuan et al., Proc Natl Acad. Sci. USA 89:8006-8010 (1992); WO 93/22434 by Yale; WO 95/24489 by Yale; Yuan and Altman, EMBO J 14:159-168 (1995), and Carrara et al., Proc. Natl. Acad. Sci. (USA) 92:2627-2631 (1995)). Representative examples of how to make and use EGS molecules to facilitate cleavage of a variety of different target molecules be found in the following non-limiting list of U.S. Pat. Nos.: 5,168,053, 5,624,824, 5,683,873, 5,728,521, 5,869,248, and 5,877,162

[0161] 11. Peptides

[0162] a) Protein Variants

[0163] 141. As discussed herein there are numerous variants of the disclosed proteins, such as, AR, Smad3, Smad4, TGF-B, Akt, IL-6, PTEN that are known and herein contemplated. In addition, to the known functional allelic variants there are derivatives of the disclosed proteins, such as AR, Smad3, Smad4, TGF-B, Akt, IL-6, PTEN which also function in the disclosed methods and compositions. Protein variants and derivatives are well understood to those of skill in the art and in can involve amino acid sequence modifications. For example, amino acid sequence modifications typically fall into one or more of three classes: substitutional, insertional or deletional variants. Insertions include amino and/or carboxyl terminal fusions as well as intrasequence insertions of single or multiple amino acid residues. Insertions ordinarily will be smaller insertions than those of amino or carboxyl terminal fusions, for example, on the order of one to four residues Immunogenic fusion protein derivatives, such as those described in the examples, are made by fusing a polypeptide sufficiently large to confer immunogenicity to the target sequence by cross-linking in vitro or by recombinant cell culture transformed with DNA encoding the fusion. Deletions are characterized by the removal of one or more amino acid residues from the protein sequence. Typically, no more than about from 2 to 6 residues are deleted at any one site within the protein molecule. These variants ordinarily are prepared by site specific mutagenesis of nucleotides in the DNA encoding the protein, thereby producing DNA encoding the variant, and thereafter expressing the DNA in recombinant cell culture. Techniques for making substitution mutations at predetermined sites in DNA having a known sequence are well known, for example M13 primer mutagenesis and PCR mutagenesis. Amino acid substitutions are typically of single residues, but can occur at a number of different locations at once; insertions usually will be on the order of about from 1 to 10 amino acid residues; and deletions will range about from 1 to 30 residues. Deletions or insertions preferably are made in adjacent pairs, i.e. a deletion of 2 residues or insertion of 2 residues. Substitutions, deletions, insertions or any combination thereof may be combined to arrive at a final construct. The mutations must not place the sequence out of reading frame and preferably will not create complementary regions that could produce secondary mRNA structure. Substitutional variants are those in which at least one residue has been removed and a different residue inserted in its place. Such substitutions generally are made in accordance with the following Tables 1 and 2 and are referred to as conservative substitutions.

TABLE 1
Amino Acid Abbreviations

| | |
|---|---|
| Amino Acid | Abbreviations |

| | |
|---|---|
| alanine | AlaA |
| allosoleucine | Aile |
| arginine | ArgR |
| asparagine | AsnN |
| aspartic acid | AspD |
| cysteine | CysC |
| glutamic acid | GluE |
| glutamine | GlnK |
| glycine | GlyG |
| histidine | HisH |
| isolelucine | IleI |
| leucine | LeuL |
| lysine | LysK |
| phenylalanine | PheF |
| proline | ProP |
| pyroglutamic acidp | Glu |
| serine | SerS |
| threonine | ThrT |
| tyrosine | TyrY |
| tryptophan | TrpW |
| valine | ValV |

[0164] TABLE 2

Amino Acid Substitutions
Original Residue Exemplary Conservative
Substitutions, others are known in the art.

| | |
|---|---|
| Ala | ser |
| Ar | glys, gln |
| Asn | gln; his |
| Asp | glu |
| Cys | ser |
| Gln | asn, lys |
| Glu | asp |
| Gly | ala |
| His | asn; gln |
| Ile | leu; val |
| Leu | ile; val |
| Lys | arg; gln; |
| Met | Leu; ile |
| Phe | met; leu; tyr |
| Ser | thr |
| Thr | ser |
| Trp | tyr |
| Tyr | trp; phe |
| Val | ile; leu |

[0165] 143. Substantial changes in function or immunological identity are made by selecting substitutions that are less conservative than those in Table 2, i.e., selecting residues that differ more significantly in their effect on maintaining (a) the structure of the polypeptide backbone in the area of the substitution, for example as a sheet or helical conformation, (b) the charge or hydrophobicity of the molecule at the target site or (c) the bulk of the side chain. The substitutions which in general are expected to produce the greatest changes in the protein properties will be those in which (a) a hydrophilic residue, e.g. seryl or threonyl, is substituted for (or by) a hydrophobic residue, e.g. leucyl, isoleucyl, phenylalanyl, valyl or alanyl; (b) a cysteine or proline is substituted for (or by) any other residue; (c) a residue having an electropositive side chain, e.g., lysyl, arginyl, or histidyl, is substituted for (or by) an electronegative residue, e.g., glutamyl or aspartyl; or (d) a residue having a bulky side chain, e.g., phenylalanine, is substituted for (or by) one not having a side chain, e.g., glycine, in this case, (e) by increasing the number of sites for sulfation and/or glycosylation.

[0166] 144. For example, the replacement of one amino acid residue with another that is biologically and/or chemically similar is known to those skilled in the art as a conservative substitution. For example, a conservative substitution would be replacing one hydrophobic residue for another, or one polar residue for another. The substitutions include combinations such as, for example, Gly, Ala; Val, Ile, Leu; Asp, Glu; Asn, Gln; Ser, Thr; Lys, Arg; and Phe, Tyr. Such conservatively substituted variations of each explicitly disclosed sequence are included within the mosaic polypeptides provided herein.

[0167] 145. Substitutional or deletional mutagenesis can be employed to insert sites for N-glycosylation (Asn-X-Thr/Ser) or O-glycosylation (Ser or Thr). Deletions of cysteine or other labile residues also may be desirable. Deletions or substitutions of potential proteolysis sites, e.g. Arg, is accomplished for example by deleting one of the basic residues or substituting one by glutaminyl or histidyl residues.

[0168] 146. Certain post-translational derivatizations are the result of the action of recombinant host cells on the expressed polypeptide. Glutaminyl and asparaginyl residues are frequently post-translationally deamidated to the corresponding glutamyl and asparyl residues. Alternatively, these residues are deamidated under mildly acidic conditions. Other post-translational modifications include hydroxylation of proline and lysine, phosphorylation of hydroxyl groups of seryl or threonyl residues, methylation of the o-amino groups of lysine, arginine, and histidine side chains (T. E. Creighton, Proteins: Structure and Molecular Properties, W. H. Freeman & Co., San Francisco pp 79-86 [1983]), acetylation of the N-terminal amine and, in some instances, amidation of the C-terminal carboxyl.

[0169] 147. It is understood that one way to define the variants and derivatives of the disclosed proteins herein is through defining the variants and derivatives in terms of homology/identity to specific known sequences. Specifically disclosed are variants of the disclosed polypeptides, such as AR, Smad3, Smad4, TGF-B, Akt, IL-6, PTEN and other proteins herein disclosed which have at least, 70% or 75% or 80% or 85% or 90% or 95% homology to the stated sequence. Those of skill in the art readily understand how to determine the homology of two proteins. For example, the homology can be calculated after aligning the two sequences so that the homology is at its highest level.

[0170] 148. Another way of calculating homology can be performed by published algorithms. Optimal alignment of sequences for comparison may be conducted by the local homology algorithm of Smith and Waterman Adv. Appl. Math. 2: 482 (1981), by the homology alignment algorithm of Needleman and Wunsch, J. MoL Biol. 48: 443 (1970), by the search for similarity method of Pearson and Lipman, Proc. Natl. Acad. Sci. U.S.A. 85: 2444 (1988), by computerized implementations of these algorithms (GAP, BESTFIT, FASTA, and TFASTA in the Wisconsin Genetics Software Package, Genetics Computer Group, 575 Science Dr., Madison, Wis.), or by inspection.

[0171] 149. The same types of homology can be obtained for nucleic acids by for example the algorithms disclosed in Zuker, M. Science 244:48-52, 1989, Jaeger et al. Proc Natl Acad Sci USA 86:7706-7710, 1989, Jaeger et al. Methods Enzymol 183:281-306, 1989 which are herein incorporated by reference for at least material related to nucleic acid alignment.

[0172] 150. It is understood that the description of conservative mutations and homology can be combined together in any combination, such as embodiments that have at least 70% homology to a particular sequence wherein the variants are conservative mutations.

[0173] 12. Antibodies

[0174] (1) Antibodies Generally

[0175] 151. The term “antibodies” is used herein in a broad sense and includes both polyclonal and monoclonal antibodies. In addition to intact immunoglobulin molecules, also included in the term “antibodies” are fragments or polymers of those immunoglobulin molecules, and human or humanized versions of immunoglobulin molecules or fragments thereof, as long as they are chosen for their ability to interact with the proteins disclosed herein, such as AR, Smad3, Smad4, TGF-B, Akt, IL-6, and PTEN, such that the antibody can modulate the effect of androgen receptor mediated events. Antibodies that bind the disclosed regions of the disclosed polypeptides, such as AR, Smad3, Smad4, TGF-B, Akt, IL-6, PTEN involved in the disclosed signal transduction pathways related to the AR are also disclosed. The antibodies can be tested for their desired activity using the in vitro assays described herein, or by analogous methods, after which their in vivo therapeutic and/or prophylactic activities are tested according to known clinical testing methods.

[0176] 152. The term “monoclonal antibody” as used herein refers to an antibody obtained from a substantially homogeneous population of antibodies, i.e., the individual antibodies within the population are identical except for possible naturally occurring mutations that may be present in a small subset of the antibody molecules. The monoclonal antibodies herein specifically include “chimeric” antibodies in which a portion of the heavy and/or light-chain is identical with or homologous to corresponding sequences in antibodies derived from a particular species or belonging to a particular antibody class or subclass, while the remainder of the chain(s) is identical with or homologous to corresponding sequences in antibodies derived from another species or belonging to another antibody class or subclass, as well as fragments of such antibodies, as long as they exhibit the desired antagonistic activity (See, U.S. Pat. No. 4,816,567 and Morrison et al., Proc Natl Acad Sci USA, 81:6851-6855 (1984)).

[0177] 153. The disclosed monoclonal antibodies can be made using any procedure which produces mono clonal antibodies. For example, monoclonal antibodies of the invention can be prepared using hybridoma methods, such as those described by Kohler and Milstein, Nature, 256:495 (1975). In a hybridoma method, a mouse or other appropriate host animal is typically immunized with an immunizing agent to elicit lymphocytes that produce or are capable of producing antibodies that will specifically bind to the immunizing agent.

[0178] 154. The monoclonal antibodies may also be made by recombinant DNA methods, such as those described in U.S. Pat. No. 4,816,567 (Cabilly et al.). DNA encoding the disclosed monoclonal antibodies can be readily isolated and sequenced using conventional procedures (e.g., by using oligonucleotide probes that are capable of binding specifically to genes encoding the heavy and light chains of murine antibodies). Libraries of antibodies or active antibody fragments can also be generated and screened using phage display techniques, e.g., as described in U.S. Pat. No. 5,804,440 to Burton et al. and U.S. Pat. No. 6,096,441 to Barbas et al.

[0179] 155. In vitro methods are also suitable for preparing monovalent antibodies. Digestion of antibodies to produce fragments thereof, particularly, Fab fragments, can be accomplished using routine techniques known in the art. For instance, digestion can be performed using papain. Examples of papain digestion are described in WO 94/29348 published Dec. 22, 1994 and U.S. Pat. No. 4,342,566. Papain digestion of antibodies typically produces two identical antigen binding fragments, called Fab fragments, each with a single antigen binding site, and a residual Fc fragment. Pepsin treatment yields a fragment that has two antigen combining sites and is still capable of cross-linking antigen.

[0180] 156. The fragments, whether attached to other sequences or not, can also include insertions, deletions, substitutions, or other selected modifications of particular regions or specific amino acids residues, provided the activity of the antibody or antibody fragment is not significantly altered or impaired compared to the non-modified antibody or antibody fragment These modifications can provide for some additional property, such as to remove/add amino acids capable of disulfide bonding, to increase its bio-longevity, to alter its secretory characteristics, etc. In any case, the antibody or antibody fragment must possess a bioactive property, such as specific binding to its cognate antigen. Functional or active regions of the antibody or antibody fragment may be identified by mutagenesis of a specific region of the protein, followed by expression and testing of the expressed polypeptide. Such methods are readily apparent to a skilled practitioner in the art and can include site-specific mutagenesis of the nucleic acid encoding the antibody or antibody fragment (Zoller, M. J. Curr. Opin. Biotechnol. 3:348-354, 1992).

[0181] 157. As used herein, the term “antibody” or “antibodies” can also refer to a human antibody and/or a humanized antibody. Many non-human antibodies (e.g., those derived from mice, rats, or rabbits) are naturally antigenic in humans, and thus can give rise to undesirable immune responses when administered to humans. Therefore, the use of human or humanized antibodies in the methods of the invention serves to lessen the chance that an antibody administered to a human will evoke an undesirable immune response.

[0182] (2) Human Antibodies

[0183] 158. The human antibodies of the invention can be prepared using any technique. Examples of techniques for human monoclonal antibody production include those described by Cole et al. (Monoclonal Antibodies and Cancer Therapy, Alan R. Liss, p. 77, 1985) and by Boerner et al. (J Immunol, 147(1):86-95, 1991). Human antibodies of the invention (and fragments thereof) can also be produced using phage display libraries (Hoogenboom et al., J Mol Biol, 227:381, 1991; Marks et al., J Mol Biol, 222:581, 1991).

[0184] 159. The human antibodies of the invention can also be obtained from transgenic animals. For example, transgenic, mutant mice that are capable of producing a full repertoire of human antibodies, in response to immunization, have been described (see, e.g., Jakobovits et al., Proc Natl Acad Sci USA, 90:2551-255 (1993); Jakobovits et al., Nature, 362:255-258 (1993); Bruggermann et al., Year in Inmunol, 7:33 (1993)). Specifically, the homozygous deletion of the antibody heavy chain joining region (J(H)) gene in these chimeric and germ-line mutant mice results in complete inhibition of endogenous antibody production, and the successful transfer of the human germ-line antibody gene array into such germ-line mutant mice results in the production of human antibodies upon antigen challenge.

[0185] (3) Humanized Antibodies

[0186] 160. Antibody humanization techniques generally involve the use of recombinant DNA technology to manipulate the DNA sequence encoding one or more polypeptide chains of an antibody molecule. Accordingly, a humanized form of a non-human antibody (or a fragment thereof) is a chimeric antibody or antibody chain (or a fragment thereof, such as an Fv, Fab, Fab′, or other antigen-binding portion of an antibody) which contains a portion of an antigen binding site from a non-human (donor) antibody integrated into the framework of a human (recipient) antibody.

[0187] 161. To generate a humanized antibody, residues from one or more complementarity determining regions (CDRs) of a recipient (human) antibody molecule are replaced by residues from one or more CDRs of a donor (non-human) antibody molecule that is known to have desired antigen binding characteristics (e.g., a certain level of specificity and affinity for the target antigen). In some instances, Fv framework (FR) residues of the human antibody are replaced by corresponding non-human residues. Humanized antibodies may also contain residues which are found neither in the recipient antibody nor in the imported CDR or framework sequences. Generally, a humanized antibody has one or more amino acid residues introduced into it from a source which is non-human. In practice, humanized antibodies are typically human antibodies in which some CDR residues and possibly some FR residues are substituted by residues from analogous sites in rodent antibodies. Humanized antibodies generally contain at least a portion of an antibody constant region (Fc), typically that of a human antibody (Jones et al., Nature, 321:522-525 (1986), Reichmann et al., Nature, 332:323-327 (1988), and Presta, Curr. Opin. Struct. Biol., 2:593-596 (1992)).

[0188] 162. Methods for humanizing non-human antibodies are well known in the art. For example, humanized antibodies can be generated according to the methods of Winter and co-workers (Jones et al., Nature, 321:522-525 (1986), Riechmann et al., Nature, 332:323-327 (1988), Verhoeyen et al., Science, 239:1534-1536 (1988)), by substituting rodent CDRs or CDR sequences for the corresponding sequences of a human antibody. Methods that can be used to produce humanized antibodies are also described in U.S. Pat. No. 4,816,567 (Cabilly et al.), U.S. Pat. No. 5,565,332 (Hoogenboom et al.), U.S. Pat. No. 5,721,367 (Kay et al.), U.S. Pat. No. 5,837,243 (Deo et al.), U.S. Pat. No. 5,939,598 (Kucherlapati et al.), U.S. Pat. No. 6,130,364 (Jakobovits et al.), and U.S. Pat. No. 6,180,377 (Morgan et al.).

[0189] (4) Administration of Antibodies

[0190] 163. Administration of the antibodies can be done as disclosed herein. Nucleic acid approaches for antibody delivery also exist. The broadly neutralizing anti such as AR, Smad3, Smad4, TGF-B, Akt, IL-6, and PTEN antibodies or fragments thereof and antibody fragments of the invention can also be administered to patients or subjects as a nucleic acid preparation (e.g., DNA or RNA) that encodes the antibody or antibody fragment, such that the patients or subjects own cells take up the nucleic acid and produce and secrete the encoded antibody or antibody fragment. The delivery of the nucleic acid can be by any means, as disclosed herein, for example.

[0191] (5) Diagnostic and Cytotoxic Agents

[0192] 164. The antibodies the disclosed polypeptides, such as AR, Smad3, Smad4, TGF-B, Akt, IL-6, and PTEN or fragments thereof can be used to identify and/or inactivate cancer cells that are dependent on the proteins involved in the disclosed signal transduction pathways in vitro or in vivo. Typically, the antibody or analog will be coupled to a label which is detectable but which does not interfere with binding to the disclosed polypeptides, such as AR, Smad3, Smad4, TGF-B, Akt, IL6, and PTEN or fragment thereof. Although described primarily with reference to radioisotopes, especially indium (“In”), which is useful for diagnostic purposes, and yttrium (“Y”), which is cytotoxic, other substances which harm or inactivate cancer cells can be substituted for the radioisotope. The antibodies or substrate analogs may be unlabeled or labeled with a therapeutic agent. These agents can be coupled either directly or indirectly to the disclosed antibodies or substrate analogs. One example of indirect coupling is by use of a spacer moiety. These spacer moieties, in turn, can be either insoluble or soluble (Diener, et al., Science, 231:148, 1986) and can be selected to enable drug release from the antibodies or substrate analogs at the target site. Examples of therapeutic agents which can be coupled to the disclosed antibodies or substrate analogs are drugs, radioisotopes, lectins, and toxins or agents which will covalently attach the antibody or substrate analog to the mema.

[0193] 165. Certain isotypes may be more preferable than others depending on such factors as distribution as well as isotype stability and emission. In general, alpha and beta particle-emitting radioisotopes are preferred in immunotherapy. Preferred are short range, high energy alpha emitters such as ²¹²Bi. Examples of radioisotopes which can be bound to the disclosed antibodies for therapeutic purposes are. ¹²⁵I, ¹³¹I, ⁹⁰Y, ⁶⁷Cu, ²¹²Bi, ²¹¹At, ²¹²Pb, ⁴⁷Sc, ¹⁰⁹Pd, and ¹⁸⁸Re.

[0194] 166. Toxins are poisonous substances produced by plants, animals, or microorganisms that, in sufficient dose, are often lethal. Diphtheria toxin is a substance produced by Corynebacterium diphtheria which can be used therapeutically. This toxin consists of an alpha and beta subunit which under proper conditions can be separated. Lectins are proteins, usually isolated from plant material, which bind to specific sugar moieties. Many lectins are also able to agglutinate cells and stimulate lymphocytes. However, ricin is a toxic lectin which has been used immumotherapeutically. This is accomplished by binding the alpha-peptide chain of ricin, which is responsible for toxicity, to the antibody molecule to enable site specific delivery of the toxic effect. Other therapeutic agents which can be coupled to the disclosed antibodies are known, or can be easily ascertained, by those of ordinary skill in the art.

[0195] 167. The radioisotopes are preferred since they are small and well characterized, and can be used as diagnostics and followed after administration using standard non-invasive radioimaging techniques.

[0196] 168. As radioisotopes decay, they emit characteristic photons or particles or both. Photons, commonly referred to as gamma rays, are penetrating. If their energy level is high enough, they can travel through the body and be detected by diagnostic instrumentation. Radioisotopes that emit photons can be attached to an antibody or substrate analog and used for diagnostic imaging. This application is termed radioimmunoscintigraphy (RIS). The shorter the distance between the antigen and the target, the shorter the required range of emission of the radioisotope. Auger electrons have a very short path length (5-10 nm) and need to be internalized to be cytotoxic (Adelstein, et al., Nucl. Med. Biol. 14:165-169 (1987)). Only antibodies or substrate analogs that are internalized after binding to a cell should be considered for radioisotopes that emit Auger electrons. Alpha particles need to be close to a cell (within 3-4 cell diameters) to be effective (Vriesendorp, et al., Radioimmunoglobulin therapy. In: High Dose Cancer Therapy. Armitage, et al. (eds). (Williams & Wilkins, Baltimore, Md. 1992 pp. 84-123). Both Auger electrons and alpha emitters have high selectivity because their short-range emission will not irradiate neighboring normal cells.

[0197] 169. The radiometals ¹¹¹In and ⁹⁰Y are, respectively, pure γ- and pure β-emitters. Iodine-125, the most commonly used emitter of Auger electrons, has a half-life of 60 days and fluently is released by the immunoconjugate in vivo (dehalogenation) (Vriesendorp, et al., 1992). The most commonly considered alpha emitters for clinical use, astatine-211 and bismuth-212, have short half-lives (7.2 h and 1.0 h, respectively) and decay into radioactive isotopes, that may not be retained by the immunoconjugate after the first alpha emission (Wilbur, Antibiot. Immunoconjug. Radiopharm. 4:85-97 (1991)). The use of an immunoconjugate radiolabeled with ¹¹¹In has been proposed to predict the behavior of the poorly imageable ⁹⁰Y-labeled immunoconjugate (Korngold, et al., Cancer Res. 20:1488-1494 (1960); Welt, et al., J. Clin. Oncol. 12:1561-1571 (1994); Breitz, et al., J. Nucl. Med. 33:1099-1112 (1992); Vriesendorp, et al., Cancer Res. (suppl) 55:5888s-5892s (1995)). Previous studies using stable radiometal chelation have demonstrated similar biodistributions for radioimmunoconjugates labeled with ¹¹¹In and ⁹⁰Y (Welt, et al., J. Clin. Oncol. 12:1561-1571 (1994); Breitz, et al., J. Nucl. Med. 33:1099-1112 (1992)).

[0198] 170. For diagnostic administration, the immunoconjugate would be radiolabeled with a pure gamma-emitting radioisotope like indium-111 (¹¹¹In) or technetium-99m (^{99m}Tc). Both of these isotopes emit gamma rays within the appropriate energy range for imaging 100-250 keV). Energies below this range are not penetrating enough to reach an external imaging device. Higher energy levels are difficult to collimate and provide diagnostic images with poor resolution. The short-half life of ^{99m}Tc restricts its use to immunoconjugates with rapid tumor uptake. The use of ¹¹¹In-labeled immunoconjugate has been proposed to predict the in vivo behavior of an immunoconjugate radiolabeled with ⁹⁰Y, a pure beta-emitter, since they have similar half-lives and comparable chelation chemistry (Vriesendorp, et al., Cancer. Res. (suppl) 55:5888s-5892s (1995); Vriesendorp, et al., Radioimmunoglobulin therapy. 1992); DeNardo, et al., J. Nucl. Med. 36:829-836 (1995); Leichner, et al., Int. J. Radiat. Oncol. Biol. Phys. 14:1033-1042 (1988)). An advantage of using two separate radioisotopes, one for imaging and one for therapy, is that it allows for outpatient treatment. The low amount of radioactivity used diagnostically does not represent a radiation hazard, while the radiation emitted by a therapeutic pure beta-emitter will largely be absorbed in the vicinity of the targeted cells. This treatment scheme is dependent on similar pharmacokinetics for both radiolabeled reagents and requires a stable means of attaching both radioactive compounds to the antibody.

[0199] 171. Some radioisotopes can be attached directly to the antibody; others require an indirect form of attachment. The radioisotopes ¹²⁵I, ¹³¹I, ^{99m}Tc, ¹⁸⁶Re and ¹⁸⁸Re can be covalently bound to proteins (including antibodies) through amino acid functional groups. For radioactive iodine it is usually through the phenolic group found on tyrosine. There are numerous methods to accomplish this: chloramine-T (Greenwood, et al. Biochem J. 89: 114-123 (1963)); and Iodogen (Salacinski, et al. Anal. Biochem. 117: 136-146 (1981)). Tc and Re can be covalently bound through the sulfhydryl group of cysteine (Griffiths, et al. Cancer Res. 51: 4594-4602 (1991)). The problem with most of the techniques is that the body has efficient methods to break these covalent bonds, releasing the radioisotopes back into the circulatory system. Generally, these methods are acceptable for imaging purposes (^{99m}Tc), but not for therapeutic purposes.

[0200] 172. Many peptide toxins have a generalized eukaryotic receptor binding domain; in these instances the toxin must be modified to prevent intoxication of cells not bearing the targeted receptor (e.g., to prevent intoxication of cells not bearing the “X” receptor but having a receptor for the unmodified toxin). Any such modifications must be made in a manner which preserves the cytotoxic functions of the molecule. Potentially useful toxins include, but are not limited to: cholera toxin, ricin, Shiga-like toxin (SLT-I, SLT-II, SLT-IIV), LT toxin, C3 toxin, Shiga toxin, pertussis toxin, tetanus toxin, Pseudomonas exotoxin, alorin, saporin, modeccin, and gelanin. Diphtheria toxin can be used to produce molecules useful as described herein. Diphtheria toxin, whose sequence is known, and hybrid molecules thereof, are described in detail in U.S. Pat. No. 4,675,382 to Murphy. The natural diphtheria toxin molecule secreted by Corynebacterium diphtheriae consists of several functional domains which can be characterized, starting at the amino terminal end of the molecule, as enzymatically-active Fragment A (amino acids Gly1-Arg193) and Fragment B (amino acids Ser194-Ser535), which includes a translocation domain and a generalized cell binding domain (amino acid residues 475 through 535). The process by which diphtheria toxin intoxicates sensitive eukaryotic cells involves at least the following steps: (i) the binding domain of diphtheria toxin binds to specific receptors on the surface of a sensitive cell; (ii) while bound to its receptor, the toxin molecule is internalized into an endocytic vesicle; (iii) either prior to internalization, or within the endocytic vesicle, the toxin molecule undergoes a proteolytic cleavage between fragments A and B; (iv) as the pH of the endocytic vesicle decreases to below 6, the toxin crosses the endosomal membrane, facilitating the delivery of Fragment A into the cytosol; (v) the catalytic activity of Fragment A (i.e., the nicotinamide adenine dinucleotide—dependent adenosine diphosphate (ADP) ribosylation of the eukaryotic protein synthesis factor termed “Elongation Factor 2”) causes the death of the intoxicated cell. A single molecule of Fragment A introduced into the cytosol is sufficient to inhibit the cell's protein synthesis machinery and kill the cell. The mechanism of cell killing by Pseudomonas exotoxin A, and possibly by certain other naturally-occurring toxins, is very similar.

[0201] 173. A mixed toxin molecule is a molecule derived from two different polypeptide toxins. Generally, as discussed above in connection with diphtheria toxin, polypeptide toxins have, in addition to the domain responsible for generalized eukaryotic cell binding, an enzymatically active domain and a translocation domain. The binding and translocation domains are required for cell recognition and toxin entry respectively. Naturally-occurring proteins which are known to have a translocation domain include diphtheria toxin, Pseudomonas exotoxin A, and possibly other peptide toxins. The translocation domains of diphtheria toxin and Pseudomonas exotoxin A are well characterized (see, e.g., Hoch et al., Proc. Natl. Acad. Sci. USA 82:1692, 1985; Colombatti et al., J. Biol. Chem. 261:3030, 1986; and Deleers et al., FEBS Lett. 160:82, 1983), and the existence and location of such a domain in other molecules may be determined by methods such as those employed by Hwang et al. Cell 48:129, 1987; and Gray et al. Proc. Natl. Acad. Sci. USA 81:2645, 1984.

[0202] 174. A useful mixed toxin hybrid molecule can be formed by fusing the enzymatically active A subunit of E. coli Shiga-like toxin (Calderwood et al., Proc. Natl. Acad. Sci. USA 84:4364, 1987) to the translocation domain (amino acid residues 202 through 460) of diphtheria toxin, and to a molecule targeting a particular cell type, as described in U.S. Pat. No. 5,906,820 to Bacha. The targeting portion of the three-part hybrid causes the molecule to attach specifically to the targeted cells, and the diphtheria toxin translocation portion acts to insert the enzymatically active A subunit of the Shiga-like toxin into the targeted cell. The enzymatically active portion of Shiga-like toxin, like diphtheria toxin, acts on the protein synthesis machinery of the cell to prevent protein synthesis, thus killing the cell.

[0203] 175. The targeting molecule (for example, the antibody), and the cytotoxin can be linked in several ways. If the hybrid molecule is produced by expression of a fused gene, a peptide bond serves as the link between the cytotoxin and the antibody or antibody fragment. Alternatively, the toxin and the binding ligand can be produced separately and later coupled by means of a non-peptide covalent bond. For example, the covalent linkage may take the form of a disulfide bond. In this case, the DNA encoding the antibody can be engineered to contain an extra cysteine codon. The cysteine must be positioned so as to not interfere with the binding activity of the molecule. The toxin molecule must be derivatized with a sulfhydryl group reactive with the cysteine of the modified antibody. In the case of a peptide toxin this can be accomplished by inserting a cysteine codon into the DNA sequence encoding the toxin. Alternatively, a sulfhydryl group, either by itself or as part of a cysteine residue, can be introduced using solid phase polypeptide techniques. For example, the introduction of sulfhydryl groups into peptides is described by Hiskey (Peptides 3:137, 1981). The introduction of sulfhydryl groups into proteins is described in Maasen et al. (Eur. J. Biochem. 134:32, 1983). Once the correct sulfhydryl groups are present, the cytotoxin and antibody are purified, both sulfur groups are reduced; cytotoxin and ligand are mixed; (in a ratio of about 1:5 to 1:20) and disulfide bond formation is allowed to proceed to completion (generally 20 to 30 minutes) at room temperature. The mixture is then dialyzed against phosphate buffered saline or chromatographed in a resin such as Sephadex to remove unreacted ligand and toxin molecules.

[0204] 176. Numerous types of cytotoxic compounds can be joined to proteins through the use of a reactive group on the cytotoxic compound or through the use of a cross-linking agent. A common reactive group that will form a stable covalent bond in vivo with an amine is isothiocyanate (Means, et al.). Chemical modifications of proteins (Holden-Day, San Francisco 1971) pp. 105-110). This group preferentially reacts with the ε-amine group of lysine. Maleimide is a commonly used reactive group to form a stable in vivo covalent bond with the sulfhydryl group on cysteine (Jo. Methods Enzymol 91: 580-609 (1983)). Monoclonal antibodies are incapable of forming covalent bonds with radiometal ions, but they can be attached to the antibody indirectly through the use of chelating agents that are covalently linked to the antibodies. Chelating agents can be attached through amines (Meares, et al., Anal. Biochem. 142:68-78 (1984)) and sulfhydral groups (Koyama Chem. Abstr. 120:217262t (1994)) of amino acid residues and also through carbohydrate groups (Rodwell, et al., Proc. Natl. Acad. Sci. 83:2632-2636 (1986); Quadri, et al., Nucl. Med. Biol. 20:559-570 (1993)). Since these chelating agents contain two types of functional groups, one to bind metal ions and the other to joining the chelate to the antibody, they are commonly referred as bifunctional chelating agents (Sundberg, et al., Nature 250:587-588 (1974)).

[0205] 177. Crosslinking agents have two reactive functional groups and are classified as being homo or heterobifunctional. Examples of homobifunctional crosslinking agents include bismaleimidohexane (BMH) which is reactive with sulfhydryl groups (Chen, et al. J Biol Chem 266: 18237-18243 (1991) and ethylene glycolbis[succinimidylsucciate] EGS which is reactive with amino groups (Browning, et al., J. Immunol. 143: 1859-1867 (1989)). An example of a heterobifunctional crosslinker is m-malemidobenzoyl-N-hydroxysuccinimide ester (MBS) (Myers, et al. J. Immunol. Meth. 121: 129-142 (1989)). These methodologies are simple and are commonly employed.

[0206] 13. Nucleic Acid Delivery

[0207] 178. In the methods described above which include the administration and uptake of exogenous DNA into the cells of a subject (i.e., gene transduction or transfection), the nucleic acids of the present invention can be in the form of naked DNA or RNA, or the nucleic acids can be in a vector for delivering the nucleic acids to the cells, whereby the antibody-encoding DNA fragment is under the transcriptional regulation of a promoter, as would be well understood by one of ordinary skill in the art. The vector can be a commercially available preparation, such as an adenovirus vector (Quantum Biotechnologies, Inc. (Laval, Quebec, Canada). Delivery of the nucleic acid or vector to cells can be via a variety of mechanisms. As one example, delivery can be via a liposome, using commercially available liposome preparations such as LIPOFECTIN, LIPOFECTAMINE (GIBCO-BRL, Inc., Gaithersburg, Md.), SUPERFECT (Qiagen, Inc. Hilden, Germany) and TRANSFECTAM (Promega Biotec, Inc., Madison, Wis.), as well as other liposomes developed according to procedures standard in the art. In addition, the nucleic acid or vector of this invention can be delivered in vivo by electroporation, the technology for which is available from Genetronics, Inc. (San Diego, Calif.) as well as by means of a SONOPORATION machine (ImaRx Pharmaceutical Corp., Tucson, Ariz.).

[0208] 179. As one example, vector delivery can be via a viral system, such as a retroviral vector system which can package a recombinant retroviral genome (see e.g., Pastan et al., Proc. Natl. Acad. Sci. USA 85:4486, 1988; Miller et al., Mol. Cell. Biol. 6:2895, 1986). The recombinant retrovirus can then be used to infect and thereby deliver to the infected cells nucleic acid encoding a broadly neutralizing antibody (or active fragment thereof) of the invention. The exact method of introducing the altered nucleic acid into mammalian cells is, of course, not limited to the use of retroviral vectors. Other techniques are widely available for this procedure including the use of adenoviral vectors (Mitani et al., Hum. Gene Ther. 5:941-948, 1994), adeno-associated viral (AAV) vectors (Goodman et al., Blood 84:1492-1500, 1994), lentiviral vectors (Naidini et al., Science 272:263-267, 1996), pseudotyped retroviral vectors (Agrawal et al., Exper. Hematol. 24:738-747, 1996). Physical transduction techniques can also be used, such as liposome delivery and receptor-mediated and other endocytosis mechanisms (see, for example, Schwartzenberger et al., Blood 87:472-478, 1996). This invention can be used in conjunction with any of these or other commonly used gene transfer methods.

[0209] 180. As one example, if the encoding nucleic acid of the invention is delivered to the cells of a subject in an adenovirus vector, the dosage for administration of adenovirus to humans can range from about 10⁷ to 10⁹ plaque forming units (pfu) per injection but can be as high as 10¹² pfu per injection (Crystal, Hum. Gene Ther. 8:985-1001, 1997; Alvarez and Curiel, Hum. Gene Ther. 8:597-613, 1997). A subject can receive a single injection, or, if additional injections are necessary, they can be repeated at six month intervals (or other appropriate time intervals, as determined by the skilled practitioner) for an indefinite period and/or until the efficacy of the treatment has been established.

[0210] 181. Parenteral administration of the nucleic acid or vector of the present invention, if used, is generally characterized by injection. Injectables can be prepared in conventional forms, either as liquid solutions or suspensions, solid forms suitable for solution of suspension in liquid prior to injection, or as emulsions. A more recently revised approach for parenteral administration involves use of a slow release or sustained release system such that a constant dosage is maintained. See, e.g., U.S. Pat. No. 3,610,795, which is incorporated by reference herein. For additional discussion of suitable formulations and various routes of administration of therapeutic compounds, see, e.g., Remington: The Science and Practice of Pharmacy (19th ed.) ed. A. R. Gennaro, Mack Publishing Company, Easton, Pa. 1995.

[0211] 14. Delivery of the Compositions to Cells

[0212] 182. There are a number of compositions and methods which can be used to deliver nucleic acids to cells, either in vitro or in vivo. These methods and compositions can largely be broken down into two classes: viral based delivery systems and non-viral based delivery systems. For example, the nucleic acids can be delivered through a number of direct delivery systems such as, electroporation, lipofection, calcium phosphate precipitation, plasmids, viral vectors, viral nucleic acids, phage nucleic acids, phages, cosmids, or via transfer of genetic material in cells or carriers such as cationic liposomes. Appropriate means for transfection, including viral vectors, chemical transfectants, or physico-mechanical methods such as electroporation and direct diffusion of DNA, are described by, for example, Wolff, J. A., et al., Science, 247, 1465-1468, (1990); and Wolff, J. A. Nature, 352, 815-818, (1991). Such methods are well known in the art and readily adaptable for use with the compositions and methods described herein. In certain cases, the methods will be modifed to specifically function with large DNA molecules. Further, these methods can be used to target certain diseases and cell populations by using the targeting characteristics of the carrier.

[0213] 183. Nucleic acids that are delivered to cells which are to be integrated into the host cell genome, typically contain integration sequences. These sequences are often viral related sequences, particularly when viral based systems are used. These viral intergration systems can also be incorporated into nucleic acids which are to be delivered using a non-nucleic acid based system of deliver, such as a liposome, so that the nucleic acid contained in the delivery system can be come integrated into the host genome.

[0214] 184. Other general techniques for integration into the host genome include, for example, systems designed to promote homologous recombination with the host genome. These systems typically rely on sequence flanking the nucleic acid to be expressed that has enough homology with a target sequence within the host cell genome that recombination between the vector nucleic acid and the target nucleic acid takes place, causing the delivered nucleic acid to be integrated into the host genome. These systems and the methods necessary to promote homologous recombination are known to those of skill in the art.

[0215] a) In vivo/ex vivo

[0216] 185. As described above, the compositions can be administered in a pharmaceutically acceptable carrier and can be delivered to the subject's cells in vivo and/or ex vivo by a variety of mechanisms well known in the art (e.g., uptake of naked DNA, liposome fusion, intramuscular injection of DNA via a gene gun, endocytosis and the like).

[0217] 186. If ex vivo methods are employed, cells or tissues can be removed and maintained outside the body according to standard protocols well known in the art. The compositions can be introduced into the cells via any gene transfer mechanism, such as, for example, calcium phosphate mediated gene delivery, electroporation, microinjection or proteoliposomes. The transduced cells can then be infused (e.g., in a pharmaceutically acceptable carrier) or homotopically transplanted back into the subject per standard methods for the cell or tissue type. Standard methods are known for transplantation or infusion of various cells into a subject.

[0218] 15. Expression Systems

[0219] 187. The nucleic acids that are delivered to cells typically contain expression controlling systems. For example, the inserted genes in viral and retroviral systems usually contain promoters, and/or enhancers to help control the expression of the desired gene product. A promoter is generally a sequence or sequences of DNA that function when in a relatively fixed location in regard to the transcription start site. A promoter contains core elements required for basic interaction of RNA polymerase and transcription factors, and may contain upstream elements and response elements.

[0220] a) Viral Promoters and Enhancers

[0221] 188. Preferred promoters controlling transcription from vectors in mammalian host cells may be obtained from various sources, for example, the genomes of viruses such as: polyoma, Simian Virus 40 (SV40), adenovirus, retroviruses, hepatitis-B virus and most preferably cytomegalovirus, or from heterologous mammalian promoters, e.g. beta actin promoter. The early and late promoters of the SV40 virus are conveniently obtained as an SV40 restriction fragment which also contains the SV40 viral origin of replication (Fiers et al., Nature, 273: 113 (1978)). The immediate early promoter of the human cytomegalovirus is conveniently obtained as a HindIII E restriction fragment (Greenway, P. J. et al., Gene 18: 355-360 (1982)). Of course, promoters from the host cell or related species also are useful herein.

[0222] 189. Enhancer generally refers to a sequence of DNA that functions at no fixed distance from the transcription start site and can be either 5′ (Laimins, L. et al., Proc. Natl. Acad. Sci. 78: 993 (1981)) or 3′ (Lusky, M. L., et al., Mol. Cell Bio. 3: 1108 (1983)) to the transcription unit. Furthermore, enhancers can be within an intron (Banerji, J. L. et al. Cell 33: 729 (1983)) as well as within the coding sequence itself (Osborne, T. F., et al., Mol. Cell Bio. 4: 1293 (1984)). They are usually between 10 and 300 bp in length, and they function in cis. Enhancers function to increase transcription from nearby promoters. Enhancers also often contain response elements that mediate the regulation of transcription. Promoters can also contain response elements that mediate the regulation of transcription. Enhancers often determine the regulation of expression of a gene. While many enhancer sequences are now known from mammalian genes (globin, elastase, albumin, -fetoprotein and insulin), typically one will use an enhancer from a eukaryotic cell virus for general expression. Preferred examples are the SV40 enhancer on the late side of the replication origin (bp 100-270), the cytomegalovirus early promoter enhancer, the polyoma enhancer on the late side of the replication origin, and adenovirus enhancers.

[0223] 190. The promotor and/or enhancer may be specifically activated either by light or specific chemical events which trigger their function. Systems can be regulated by reagents such as tetracycline and dexamethasone. There are also ways to enhance viral vector gene expression by exposure to irradiation, such as gamma irradiation, or alkylating chemotherapy drugs.

[0224] 191. In certain embodiments the promoter and/or enhancer region can act as a constitutive promoter and/or enhancer to maximize expression of the region of the transcription unit to be transcribed. In certain constructs the promoter and/or enhancer region be active in all eukaryotic cell types, even if it is only expressed in a particular type of cell at a particular time. A preferred promoter of this type is the CMV promoter (650 bases). Other preferred promoters are SV40 promoters, cytomegalovirus (full length promoter), and retroviral vector LTF.

[0225] 192. It has been shown that all specific regulatory elements can be cloned and used to construct expression vectors that are selectively expressed in specific cell types such as melanoma cells. The glial fibrillary acetic protein (GFAP) promoter has been used to selectively express genes in cells of glial origin.

[0226] 193. Expression vectors used in eukaryotic host cells (yeast, fungi, insect, plant, animal, human or nucleated cells) may also contain sequences necessary for the termination of transcription which may affect mRNA expression. These regions are transcribed as polyadenylated segments in the untranslated portion of the mRNA encoding tissue factor protein. The 3′ untranslated regions also include transcription termination sites. It is preferred that the transcription unit also contain a polyadenylation region. One benefit of this region is that it increases the likelihood that the transcribed unit will be processed and transported like mRNA. The identification and use of polyadenylation signals in expression constructs is well established. It is preferred that homologous polyadenylation signals be used in the transgene constructs. In certain transcription units, the polyadenylation region is derived from the SV40 early polyadenylation signal and consists of about 400 bases. It is also preferred that the transcribed units contain other standard sequences alone or in combination with the above sequences improve expression from, or stability of, the constructs

[0227] b) Markers

[0228] 194. The viral vectors can include nucleic acid sequence encoding a marker product. This marker product is used to determine if the gene has been delivered to the cell and once delivered is being expressed. Preferred marker genes are the E. Coli lacZ gene, which encodes β-galactosidase, and green fluorescent protein.

[0229] 195. In some embodiments the marker may be a selectable marker. Examples of suitable selectable markers for mammalian cells are dihydrofolate reductase (DHFR), thymidine kinase, neomycin, neomycin analog G418, hydromycin, and puromycin. When such selectable markers are successfully transferred into a mammalian host cell, the transformed mammalian host cell can survive if placed under selective pressure. There are two widely used distinct categories of selective regimes. The first category is based on a cell's metabolism and the use of a mutant cell line which lacks the ability to grow independent of a supplemented media Two examples are: CHO DHFR-cells and mouse LTK-cells. These cells lack the ability to grow without the addition of such nutrients as thymidine or hypoxanthine. Because these cells lack certain genes necessary for a complete nucleotide synthesis pathway, they cannot survive unless the missing nucleotides are provided in a supplemented media. An alternative to supplementing the media is to introduce an intact DHFR or TK gene into cells lacking the respective genes, thus altering their growth requirements. Individual cells which were not transformed with the DHFR or TK gene will not be capable of survival in non-supplemented media

[0230] 196. The second category is dominant selection which refers to a selection scheme used in any cell type and does not require the use of a mutant cell line. These schemes typically use a drug to arrest growth of a host cell. Those cells which have a novel gene would express a protein conveying drug resistance and would survive the selection. Examples of such dominant selection use the drugs neomycin, (Southern P. and Berg, P., J. Molec. Appl. Genet. 1: 327 (1982)), mycophenolic acid, (Mulligan, R. C. and Berg, P. Science 209: 1422 (1980)) or hygromycin, (Sugden, B. et al., Mol. Cell. Biol. 5: 410-413 (1985)). The three examples employ bacterial genes under eukaryotic control to convey resistance to the appropriate drug G418 or neomycin (geneticin), xgpt (mycophenolic acid) or hygromycin, respectively. Others include the neomycin analog G418 and puramycin.

[0231] 16. Pharmaceutical Carriers/Delivery of Pharamceutical Products

[0232] 197. As described above, the compositions can also be administered in vivo in a pharmaceutically acceptable carrier. By “pharmaceutically acceptable” is meant a material that is not biologically or otherwise undesirable, i.e., the material may be administered to a subject, along with the nucleic acid or vector, without causing any undesirable biological effects or interacting in a deleterious manner with any of the other components of the pharmaceutical composition in which it is contained. The carrier would naturally be selected to minimize any degradation of the active ingredient and to minimize any adverse side effects in the subject, as would be well known to one of skill in the art.

[0233] 198. The compositions may be administered orally, parenterally (e.g., intrvenously), by intramuscular injection, by intraperitoneal injection, transdermally, extracorporeally, topically or the like, including topical intranasal administration or administration by inhalant. As used herein, “topical intranasal administration” means delivery of the compositions into the nose and nasal passages through one or both of the nares and can comprise delivery by a spraying mechanism or droplet mechanism, or through aerosolization of the nucleic acid or vector. Administration of the compositions by inhalant can be through the nose or mouth via delivery by a spraying or droplet mechanism. Delivery can also be directly to any area of the respiratory system (e.g., lungs) via intubation. The exact amount of the compositions required will vary from subject to subject, depending on the species, age, weight and general condition of the subject, the severity of the allergic disorder being treated, the particular nucleic acid or vector used, its mode of administration and the like. Thus, it is not possible to specify an exact amount for every composition. However, an appropriate amount can be determined by one of ordinary skill in the art using only routine experimentation given the teachings herein.

[0234] 199. Parenteral administration of the composition, if used, is generally characterized by injection. Injectables can be prepared in conventional forms, either as liquid solutions or suspensions, solid forms suitable for solution of suspension in liquid prior to injection, or as emulsions. A more recently revised approach for parenteral administration involves use of a slow release or sustained release system such that a constant dosage is maintained. See, e.g., U.S. Pat. No. 3,610,795, which is incorporated by reference herein.

[0235] 200. The materials may be in solution; suspension (for example, incorporated into microparticles, liposomes, or cells). These may be targeted to a particular cell type via antibodies, receptors, or receptor ligands. The following references are examples of the use of this technology to target specific proteins to tumor tissue (Senter, et al., Bioconjugate Chem., 2:447-451, (1991); Bagshawe, K. D., Br. J. Cancer, 60:275-281, (1989); Bagshawe, et al., Br. J. Cancer, 58:700-703, (1988); Senter, et al., Bioconjugate Chem., 4:3-9, (1993); Battelli, et al., Cancer Immunol. Immunother., 35:421-425, (1992); Pietersz and McKenzie, Immunolog. Reviews, 129:57-80, (1992); and Roffler, et al., Biochem. Pharmacol, 42:2062-2065, (1991)). Vehicles such as “stealth” and other antibody conjugated liposomes (including lipid mediated drug targeting to colonic carcinoma), receptor mediated targeting of DNA through cell specific ligands, lymphocyte directed tumor targeting, and highly specific therapeutic retroviral targeting of murine glioma cells in vivo. The following references are examples of the use of this technology to target specific proteins to tumor tissue (Hughes et al., Cancer Research, 49:6214-6220, (1989); and Litzinger and Huang, Biochimica et Biophysica Acta, 1104:179-187, (1992)). In general, receptors are involved in pathways of endocytosis, either constitutive or ligand induced. These receptors cluster in clathrin-coated pits, enter the cell via clathrin-coated vesicles, pass through an acidified endosome in which the receptors are sorted, and then either recycle to the cell surface, become stored intracellularly, or are degraded in lysosomes. The internalization pathways serve a variety of functions, such as nutrient uptake, removal of activated proteins, clearance of macromolecules, opportunistc entry of viruses and toxins, dissociation and degradation of ligand, and receptor-level regulation. Many receptors follow more than one intracellular pathway, depending on the cell type, receptor concentration, type of ligand, ligand valency, and ligand concentration. Molecular and cellular mechanisms of receptor-mediated endocytosis has been reviewed (Brown and Greene, DNA and Cell Biology 10:6, 399-409 (1991)).

[0236] a) Pharmaceutically Acceptable Carriers

[0237] 201. The compositions, including antibodies, can be used therapeutically in combination with a pharmaceutically acceptable carrier.

[0238] 202. Suitable carriers and their formulations are described in Remington: The Science and Practice of Pharmacy (19th ed.) ed. A. R. Gennaro, Mack Publishing Company, Easton, Pa. 1995. Typically, an appropriate amount of a pharmaceutically-acceptable salt is used in the formulation to render the formulation isotonic. Examples of the pharmaceutically-acceptable carrier include, but are not limited to, saline, Ringer's solution and dextrose solution. The pH of the solution is preferably from about 5 to about 8, and more preferably from about 7 to about 7.5. Further carriers include sustained release preparations such as semipermeable matrices of solid hydrophobic polymers containing the antibody, which matrices are in the form of shaped articles, e.g., films, liposomes or microparticles. It will be apparent to those persons skilled in the art that certain carriers may be more preferable depending upon, for instance, the route of administration and concentration of composition being administered.

[0239] 203. Pharmaceutical carriers are known to those skilled in the art. These most typically would be standard carriers for administration of drugs to humans, including solutions such as sterile water, saline, and buffered solutions at physiological pH. The compositions can be administered intramuscularly or subcutaneously. Other compounds will be administered according to standard procedures used by those skilled in the art.

[0240] 204. Pharmaceutical compositions may include carriers, thickeners, diluents, buffers, preservatives, surface active agents and the like in addition to the molecule of choice. Pharmaceutical compositions may also include one or more active ingredients such as antimicrobial agents, antiinflammatory agents, anesthetics, and the like.

[0241] 205. The pharmaceutical composition may be administered in a number of ways depending on whether local or systemic treatment is desired, and on the area to be treated. Administration may be topically (including ophthalmically, vaginally, rectally, intranasally), orally, by inhalation, or parenterally, for example by intravenous drip, subcutaneous, intraperitoneal or intramuscular injection. The disclosed antibodies can be administered intravenously, intraperitoneally, intramuscularly, subcutaneously, intracavity, or transdermally.

[0242] 206. Preparations for parenteral administration include sterile aqueous or non-aqueous solutions, suspensions, and emulsions. Examples of non-aqueous solvents are propylene glycol, polyethylene glycol, vegetable oils such as olive oil, and injectable organic esters such as ethyl oleate. Aqueous carriers include water, alcoholic/aqueous solutions, emulsions or suspensions, including saline and buffered media. Parenteral vehicles include sodium chloride solution, Ringer's dextrose, dextrose and sodium chloride, lactated Ringer's, or fixed oils. Intravenous vehicles include fluid and nutrient replenishers, electrolyte replenishers (such as those based on Ringer's dextrose), and the like. Preservatives and other additives may also be present such as, for example, antimicrobials, anti-oxidants, chelating agents, and inert gases and the like.

[0243] 207. Formulations for topical administration may include ointments, lotions, creams, gels, drops, suppositories, sprays, liquids and powders. Conventional pharmaceutical carriers, aqueous, powder or oily bases, thickeners and the like may be necessary or desirable.

[0244] 208. Compositions for oral administration include powders or granules, suspensions or solutions in water or non-aqueous media, capsules, sachets, or tablets. Thickeners, flavorings, diluents, emulsifiers, dispersing aids or binders may be desirable.

[0245] 209. Some of the compositions may potentially be administered as a pharmaceutically acceptable acid- or base-addition salt, formed by reaction with inorganic acids such as hydrochloric acid, hydrobromic acid, perchloric acid, nitric acid, thiocyanic acid, sulfuric acid, and phosphoric acid, and organic acids such as formic acid, acetic acid, propionic acid, glycolic acid, lactic acid, pyruvic acid, oxalic acid, malonic acid, succinic acid, maleic acid, and fumaric acid, or by reaction with an inorganic base such as sodium hydroxide, ammonium hydroxide, potassium hydroxide, and organic bases such as mono-, di-, trialkyl and aryl amines and substituted ethanolamines.

[0246] b) Therapeutic Uses

[0247] 210. Effective dosages and schedules for administering the compositions may be determined empirically, and making such determinations is within the skill in the art. The dosage ranges for the administration of the compositions are those large enough to produce the desired effect in which the symptoms disorder are effected. The dosage should not be so large as to cause adverse side effects, such as unwanted cross-reactions, anaphylactic reactions, and the like. Generally, the dosage will vary with the age, condition, sex and extent of the disease in the patient, route of administration, or whether other drugs are included in the regimen, and can be determined by one of skill in the art. The dosage can be adjusted by the individual physician in the event of any counterindications. Dosage can vary, and can be administered in one or more dose administrations daily, for one or several days. Guidance can be found in the literature for appropriate dosages for given classes of pharmaceutical products. For example, guidance in selecting appropriate doses for antibodies can be found in the literature on therapeutic uses of antibodies, e.g., Handbook of Monoclonal Antibodies, Ferrone et al., eds., Noges Publications, Park Ridge, N.J., (1985) ch. 22 and pp. 303-357; Smith et al., Antibodies in Human Diagnosis and Therapy, Haber et al., eds., Raven Press, New York (1977) pp. 365-389. A typical daily dosage of the antibody used alone might range from about 1 μg/kg to up to 100 mg/kg of body weight or more per day, depending on the factors mentioned above.

[0248] 211. Following administration of a disclosed composition, such as an antibody, for treating, inhibiting, or preventing prostate cancer, the efficacy of the therapeutic antibody can be assessed in various ways well known to the skilled practitioner. For instance, one of ordinary skill in the art will understand that a composition, such as an antibody, disclosed herein is efficacious in treating or inhibiting prostate cancer in a subject by observing that the composition reduces a tumor mass or reduces the amount of PSA present in an assay, as disclosed herein. The compositions that inhibit prostate cancer as disclosed herein may be administered prophylactically to patients or subjects who are at risk for prostate cancer.

[0249] 212. Other molecules that interact with the disclosed polypeptides, such as AR, Smad3, Smad4, TGF-B, Akt, IL-6, PTN to inhibit the disclosed interactions or modulate the disclosed AR activities, which do not have a specific pharmacuetical function, but which may be used for tracking changes within cellular chromosomes or for the delivery of diagnositc tools for example can be delivered in ways similar to those described for the pharmaceutical products.

[0250] 17. Chips and Micro Arrays

[0251] 213. Disclosed are chips where at least one address is the sequences or part of the sequences set forth in any of the nucleic acid sequences disclosed herein or molecular relationships disclosed herein. Also disclosed are chips where at least one address is the sequences or portion of sequences set forth in any of the peptide sequences disclosed herein or molecular relationships disclosed herein.

[0252] 214. Also disclosed are chips where at least one address is a variant of the sequences or part of the sequences set forth in any of the nucleic acid sequences disclosed herein or molecular relationships disclosed herein. Also disclosed are chips where at least one address is a variant of the sequences or portion of sequences set forth in any of the peptide sequences disclosed herein or molecular relationships disclosed herein.

[0253] 18. Computer Readable Mediums

[0254] 215. It is understood that the disclosed nucleic acids and proteins can be represented as a sequence consisting of the nucleotides of amino acids. There are a variety of ways to display these sequences, for example the nucleotide guanosine can be represented by G or g. Likewise the amino acid valine can be represented by Val or V. Those of skill in the art understand how to display and express any nucleic acid or protein sequence in any of the variety of ways that exist, each of which is considered herein disclosed. Specifically contemplated herein is the display of these sequences on computer readable mediums, such as, commercially available floppy disks, tapes, chips, hard drives, compact disks, and video disks, or other computer readable mediums. Also disclosed are the binary code representations of the disclosed sequences. Those of skill in the art understand what computer readable mediums. Thus, computer readable mediums on which the nucleic acids or protein sequences are recorded, stored, or saved.

[0255] 216. Also disclosed are any computer mediums containing the specific signal transduction relationships disclosed herein and/or their effects.

[0256] 19. Compositions Identified by Screening with Disclosed Compositions/Combinatorial Chemistry

[0257] a) Combinatorial Chemistry

[0258] 217. The disclosed compositions can be used as targets for any combinatorial technique to identify molecules or macromolecular molecules that interact with the disclosed compositions in a desired way. The nucleic acids, peptides, and related molecules, such as the disclosed polypeptides, such as AR, Smad3, Smad4, TGF-B, Akt, IL-6, PTEN or fragments thereof disclosed herein can be used as targets for the combinatorial approaches.

[0259] 218. It is understood that when using the disclosed compositions in combinatorial techniques or screening methods, molecules, such as macromolecular molecules, will be identified that have particular desired properties such as inhibition or stimulation or the target molecule's function. The molecules identified and isolated when using the disclosed compositions, such as, the disclosed polypeptides, such as AR, Smad3, Smad4, TGF-B, Akt, IL-6, PTEN, are also disclosed. Thus, the products produced using the combinatorial or screening approaches that involve the disclosed compositions, such as, the disclosed polypeptides, such as AR, Smad3, Smad4, TGF-B, Akt, IL-6, PTEN, are also considered herein disclosed.

[0260] 219. Combinatorial chemistry includes but is not limited to all methods for isolating small molecules or macromolecules that are capable of binding either a small molecule or another macromolecule, typically in an iterative process. Proteins, oligonucleotides, and sugars are examples of macromolecules. For example, oligonucleotide molecules with a given function, catalytic or ligand-binding, can be isolated from a complex mixture of random oligonucleotides in what has been referred to as “in vitro genetics” (Szostak, TIBS 19:89, 1992). One synthesizes a large pool of molecules bearing random and defined sequences and subjects that complex mixture, for example, approximately 10¹⁵ individual sequences in 100 μg of a 100 nucleotide RNA, to some selection and enrichment process. Through repeated cycles of affinity chromatography and PCR amplification of the molecules bound to the ligand on the column, Ellington and Szostak (1990) estimated that 1 in 10¹⁰ RNA molecules folded in such a way as to bind a small molecule dyes. DNA molecules with such ligand-binding behavior have been isolated as well (Ellington and Szostak, 1992; Bock et al, 1992). Techniques aimed at similar goals exist for small organic molecules, proteins, antibodies and other macromolecules known to those of skill in the art. Screening sets of molecules for a desired activity whether based on small organic libraries, oligonucleotides, or antibodies is broadly referred to as combinatorial chemistry. Combinatorial techniques are particularly suited for defining binding interactions between molecules and for isolating molecules that have a specific binding activity, often called aptamers when the macromolecules are nucleic acids.

[0261] 220. There are a number of methods for isolating proteins which either have de novo activity or a modified activity. For example, phage display libraries have been used to isolate numerous peptides that interact with a specific target. (See for example, U.S. Pat. Nos. 6,031,071; 5,824,520; 5,596,079; and 5,565,332 which are herein incorporated by reference at least for their material related to phage display and methods relate to combinatorial chemistry)

[0262] 221. A preferred method for isolating proteins that have a given function is described by Roberts and Szostak (Roberts R. W. and Szostak J. W. Proc. Natl. Acad. Sci. USA, 94(23)12997-302 (1997). This combinatorial chemistry method couples the functional power of proteins and the genetic power of nucleic acids. An RNA molecule is generated in which a puromycin molecule is covalently attached to the 3′-end of the RNA molecule. An in vitro translation of this modified RNA molecule causes the correct protein, encoded by the RNA to be translated. In addition, because of the attachment of the puromycin, a peptdyl acceptor which cannot be extended, the growing peptide chain is attached to the puromycin which is attached to the RNA. Thus, the protein molecule is attached to the genetic material that encodes it. Normal in vitro selection procedures can now be done to isolate functional peptides. Once the selection procedure for peptide function is complete traditional nucleic acid manipulation procedures are performed to amplify the nucleic acid that codes for the selected functional peptides. After amplification of the genetic material, new RNA is transcribed with puromycin at the 3 ′-end, new peptide is translated and another functional round of selection is performed. Thus, protein selection can be performed in an iterative manner just like nucleic acid selection techniques. The peptide which is translated is controlled by the sequence of the RNA attached to the puromycin. This sequence can be anything from a random sequence engineered for optimum translation (i.e. no stop codons etc.) or it can be a degenerate sequence of a known RNA molecule to look for improved or altered function of a known peptide. The conditions for nucleic acid amplification and in vitro translation are well known to those of ordinary skill in the art and are preferably performed as in Roberts and Szostak (Roberts R. W. and Szostak J. W. Proc. Natl. Acad. Sci. USA, 94(23)12997-302 (1997)).

[0263] 222. Another preferred method for combinatorial methods designed to isolate peptides is described in Cohen et al. (Cohen B. A., et al., Proc. Natl. Acad. Sci. USA 95(24): 14272-7 (1998)). This method utilizes and modifies two-hybrid technology. Yeast two-hybrid systems are useful for the detection and analysis of protein:protein interactions. The two-hybrid system; initially described in the yeast Saccharomyces cerevisiae, is a powerful molecular genetic technique for identifying new regulatory molecules, specific to the protein of interest (Fields and Song, Nature 340:245-6 (1989)). Cohen et al., modified this technology so that novel interactions between synthetic or engineered peptide sequences could be identified which bind a molecule of choice. The benefit of this type of technology is that the selection is done in an intracellular environment. The method utilizes a library of peptide molecules that attached to an acidic activation domain. A peptide of choice, for example a AR, Smad3, Smad4, TGF-B, Akt, IL-6, and PTEN or fragment thereof, is attached to a DNA binding domain of a transcriptional activation protein, such as Gal 4. By performing the Two-hybrid technique on this type of system, molecules that bind the AR, Smad3, Smad4, TGF-B, Akt, IL-6, and PTEN or fragment thereof, can be identified.

[0264] 223. Using methodology well known to those of skill in the art, in combination with various combinatorial libraries, one can isolate and characterize those small molecules or macromolecules, which bind to or interact with the desired target. The relative binding affinity of these compounds can be compared and optimum compounds identified using competitive binding studies, which are well known to those of skill in the art.

[0265] 224. Techniques for making combinatorial libraries and screening combinatorial libraries to isolate molecules which bind a desired target are well known to those of skill in the art. Representative techniques and methods can be found in but are not limited to U.S. Pat. Nos. 5,084,824, 5,288,514, 5,449,754, 5,506,337, 5,539,083, 5,545,568, 5,556,762, 5,565,324, 5,565,332, 5,573,905, 5,618,825, 5,619,680, 5,627,210, 5,646,285, 5,663,046, 5,670,326, 5,677,195, 5,683,899, 5,688,696, 5,688,997, 5,698,685, 5,712,146, 5,721,099, 5,723,598, 5,741,713, 5,792,431, 5,807,683, 5,807,754, 5,821,130, 5,831,014, 5,834,195, 5,834,318, 5,834,588, 5,840,500, 5,847,150, 5,856,107, 5,856,496, 5,859,190, 5,864,010, 5,874,443, 5,877,214, 5,880,972, 5,886,126, 5,886,127, 5,891,737, 5,916,899, 5,919,955, 5,925,527, 5,939,268, 5,942,387, 5,945,070, 5,948,696, 5,958,702, 5,958,792, 5,962,337, 5,965,719, 5,972,719, 5,976,894, 5,980,704, 5,985,356, 5,999,086, 6,001,579, 6,004,617, 6,008,321, 6,017,768, 6,025,371, 6,030,917, 6,040,193, 6,045,671, 6,045,755, 6,060,596, and 6,061,636.

[0266] 225. Combinatorial libraries can be made from a wide array of molecules using a number of different synthetic techniques. For example, libraries containing fused 2,4-pyrimidinediones (U.S. Pat. No. 6,025,371) dihydrobenzopyrans (U.S. Pat. Nos. 6,017,768and 5,821,130), amide alcohols (U.S. Pat. No. 5,976,894), hydroxy-amino acid amides (U.S. Pat. No. 5,972,719) carbohydrates (U.S. Pat. No. 5,965,719), 1,4-benzodiazepin-2,5-diones (U.S. Pat. No. 5,962,337), cyclics (U.S. Pat. No. 5,958,792), biaryl amino acid amides (U.S. Pat. No. 5,948,696), thiophenes (U.S. Pat. No. 5,942,387), tricyclic Tetrahydroquinolines (U.S. Pat. No. 5,925,527), benzofurans (U.S. Pat. No. 5,919,955), isoquinolines (U.S. Pat. No. 5,916,899), hydantoin and thiohydantoin (U.S. Pat. No. 5,859,190), indoles (U.S. Pat. No. 5,856,496), imidazol-pyrido-indole and imidazol-pyrido-benzothiophenes (U.S. Pat. No. 5,856,107) substituted 2-methylene-2,3-dihydrothiazoles (U.S. Pat. No. 5,847,150), quinolines (U.S. Pat. No. 5,840,500), PNA (U.S. Pat. No. 5,831,014), containing tags (U.S. Pat. No. 5,721,099), polyketides (U.S. Pat. No. 5,712,146), morpholino-subunits (U.S. Pat. No. 5,698,685 and 5,506,337), sulfamides (U.S. Pat. No. 5,618,825), and benzodiazepines (U.S. Pat. No. 5,288,514).

[0267] 226. As used herein combinatorial methods and libraries included traditional screening methods and libraries as well as methods and libraries used in interative processes.

[0268] b) Computer Assisted Drug Design

[0269] 227. The disclosed compositions can be used as targets for any molecular modeling technique to identify either the structure of the disclosed compositions or to identify potential or actual molecules, such as small molecules, which interact in a desired way with the disclosed compositions.

[0270] 228. It is understood that when using the disclosed compositions in modeling techniques, molecules, such as macromolecular molecules, will be identified that have particular desired properties such as inhibition or stimulation or the target molecule's function. The molecules identified and isolated when using the disclosed compositions, such as, AR, Smad3, Smad4, TGF-B, Akt, IL-6, and PTEN or fragment thereof, are also disclosed. Thus, the products produced using the molecular modeling approaches that involve the disclosed compositions, such as, AR, Smad3, Smad4, TGF-B, Akt, IL-6, and PTEN or fragment thereof, are also considered herein disclosed.

[0271] 229. Thus, one way to isolate molecules that bind a molecule of choice is through rational design. This is achieved through structural information and computer modeling. Computer modeling technology allows visualization of the three-dimensional atomic structure of a selected molecule and the rational design of new compounds that will interact with the molecule. The three-dimensional construct typically depends on data from x-ray crystallographic analyses or NMR imaging of the selected molecule. The molecular dynamics require force field data. The computer graphics systems enable prediction of how a new compound will link to the target molecule and allow experimental manipulation of the structures of the compound and target molecule to perfect binding specificity. Prediction of what the molecule-compound interaction will be when small changes are made in one or both requires molecular mechanics software and computationally intensive computers, usually coupled with user-friendly, menu-driven interfaces between the molecular design program and the user.

[0272] 230. Examples of molecular modeling systems are the CHARMm and QUANTA programs, Polygen Corporation, Waltham, Mass. CHARMm performs the energy minimization and molecular dynamics functions. QUANTA performs the construction, graphic modeling and analysis of molecular structure. QUANTA allows interactive construction, modification, visualization, and analysis of the behavior of molecules with each other.

[0273] 231. A number of articles review computer modeling drugs interactive with specific proteins, such as Rotivinen, et al., 1988 Acta Pharmaceutica Fennica 97, 159-166; Ripka, New Scientist 54-57 (Jun. 16, 1988); McKinaly and Rossmann, 1989 Annu. Rev. Pharmacol. Toxiciol. 29, 111-122; Perry and Davies, QSAR: Quantitative Structure-Activity Relationships in Drug Design pp. 189-193 (Alan R. Liss, Inc. 1989); Lewis and Dean, 1989 Proc. R. Soc. Lond. 236, 125-140 and 141-162; and, with respect to a model enzyme for nucleic acid components, Askew, et al., 1989 J. Am. Chem. Soc. 111, 1082-1090. Other computer programs that screen and graphically depict chemicals are available from companies such as BioDesign, Inc., Pasadena, Calif., Allelix, Inc, Mississauga, Ontario, Canada, and Hypercube, Inc., Cambridge, Ontario Although these are primarily designed for application to drugs specific to particular proteins, they can be adapted to design of molecules specifically interacting with specific regions of DNA or RNA, once that region is identified.

[0274] 232. Although described above with reference to design and generation of compounds which could alter binding, one could also screen libraries of known compounds, including natural products or synthetic chemicals, and biologically active materials, including proteins, for compounds which alter substrate binding or enzymatic activity.

[0275] 20. Kits

[0276] 233. Disclosed herein are kits that are drawn to reagents that can be used in practicing the methods disclosed herein. The kits can include any reagent or combination of reagent discussed herein or that would be understood to be required or beneficial in the practice of the disclosed methods. For example, the kits could include primers to perform the amplification reactions discussed in certain embodiments of the methods, as well as the buffers and enzymes required to use the primers as intended. For example, disclosed is a kit for isolating molecules that effect the pathways disclosed herein, that comprises, for example, cells comprising AR and, for example, Smad3, Smad4, TGF-B, Akt, IL-6, and/or PTEN which can be used to assay compounds which modulate the effects of these proteins on AR.

[0277] D. Methods of Making the Compositions

[0278] 234. The compositions disclosed herein and the compositions necessary to perform the disclosed methods can be made using any method known to those of skill in the art for that particular reagent or compound unless otherwise specifically noted.

[0279] 1. Nucleic Acid Synthesis

[0280] 235. For example, the nucleic acids, such as, the oligonucleotides to be used as primers can be made using standard chemical synthesis methods or can be produced using enzymatic methods or any other known method. Such methods can range from standard enzymatic digestion followed by nucleotide fragment isolation (see for example, Sambrook et al., Molecular Cloning: A Laboratory Manual, 2nd Edition (Cold Spring Harbor Laboratory Press, Cold Spring Harbor, N.Y., 1989) Chapters 5, 6) to purely synthetic methods, for example, by the cyanoethyl phosphoramidite method using a Milligen or Beckman System 1Plus DNA synthesizer (for example, Model 8700 automated synthesizer of Milligen-Biosearch, Burlington, Mass. or ABI Model 380B). Synthetic methods useful for making oligonucleotides are also described by Ikuta et al., Ann. Rev. Biochem. 53:323-356 (1984), (phosphotriester and phosphite-triester methods), and Narang et al., Methods Enzymol., 65:610-620 (1980), (phosphotriester method). Protein nucleic acid molecules can be made using known methods such as those described by Nielsen et al., Bioconjug. Chem. 5:3-7 (1994).

[0281] 2. Peptide Synthesis

[0282] 236. One method of producing the disclosed proteins, such as SEQ ID NO:23, is to link two or more peptides or polypeptides together by protein chemistry techniques. For example, peptides or polypeptides can be chemically synthesized using currently available laboratory equipment using either Fmoc (9-fluorenylmethyloxycarbonyl) or Boc (tert-butyloxycarbonoyl) chemistry. (Applied Biosystems, Inc., Foster City, Calif.). One skilled in the art can readily appreciate that a peptide or polypeptide corresponding to the disclosed proteins, for example, can be synthesized by standard chemical reactions. For example, a peptide or polypeptide can be synthesized and not cleaved from its synthesis resin whereas the other fragment of a peptide or protein can be synthesized and subsequently cleaved from the resin, thereby exposing a terminal group which is functionally blocked on the other fragment. By peptide condensation reactions, these two fragments can be covalently joined via a peptide bond at their carboxyl and amino termini, respectively, to form an antibody, or fragment thereof. (Grant G A (1992) Synthetic Peptides: A User Guide. W.H. Freeman and Co., N.Y. (1992); Bodansky M and Trost B., Ed. (1993) Principles of Peptide Synthesis. Springer-Verlag Inc., N.Y. (which is herein incorporated by reference at least for material related to peptide synthesis). Alternatively, the peptide or polypeptide is independently synthesized in vivo as described herein. Once isolated, these independent peptides or polypeptides may be linked to form a peptide or fragment thereof via similar peptide condensation reactions.

[0283] 237. For example, enzymatic ligation of cloned or synthetic peptide segments allow relatively short peptide fragments to be joined to produce larger peptide fragments, polypeptides or whole protein domains (Abrahmsen L et al., Biochemistry, 30:4151 (1991)). Alternatively, native chemical ligation of synthetic peptides can be utilized to synthetically construct large peptides or polypeptides from shorter peptide fragments. This method consists of a two step chemical reaction (Dawson et al. Synthesis of Proteins by Native Chemical Ligation. Science, 266:776-779 (1994)). The first step is the chemoselective reaction of an unprotected synthetic peptide—thioester with another unprotected peptide segment containing an amino-terminal Cys residue to give a thioester-linked intermediate as the initial covalent product. Without a change in the reaction conditions, this intermediate undergoes spontaneous, rapid intramolecular reaction to form a native peptide bond at the ligation site (Baggiolini M et al. (1992) FEBS Lett. 307:97-101; Clark-Lewis I et al., J.Biol.Chem., 269:16075 (1994); Clark-Lewis I et al., Biochemistry, 30:3128 (1991); Rajarathnam K. et al., Biochemistry 33:6623-30 (1994)).

[0284] 238. Alternatively, unprotected peptide segments are chemically linked where the bond formed between the peptide segments as a result of the chemical ligation is an unnatural (non-peptide) bond (Schnolzer, M et al. Science, 256:221 (1992)). This technique has been used to synthesize analogs of protein domains as well as large amounts of relatively pure proteins with full biological activity (deLisle Milton R C et al., Techniques in Protein Chemistry IV. Academic Press, New York, pp. 257-267 (1992)).

[0285] 3. Process Claims for Making the Compositions

[0286] 239. Disclosed are processes for making the compositions as well as making the intermediates leading to the compositions. There are a variety of methods that can be used for making these compositions, such as synthetic chemical methods and standard molecular biology methods. It is understood that the methods of making these and the other disclosed compositions are specifically disclosed.

[0287] 240. Disclosed are cells produced by the process of transforming the cell with any of the disclosed nucleic acids. Disclosed are cells produced by the process of transforming the cell with any of the non-naturally occurring disclosed nucleic acids.

[0288] 241. Disclosed are any of the disclosed peptides produced by the process of expressing any of the disclosed nucleic acids. Disclosed are any of the non-naturally occurring disclosed peptides produced by the process of expressing any of the disclosed nucleic acids. Disclosed are any of the disclosed peptides produced by the process of expressing any of the non-naturally disclosed nucleic acids.

[0289] 242. Disclosed are animals produced by the process of transfecting a cell within the animal with any of the nucleic acid molecules disclosed herein. Disclosed are animals produced by the process of transfecting a cell within the animal any of the nucleic acid molecules disclosed herein, wherein the animal is a mammal. Also disclosed are animals produced by the process of transfecting a cell within the animal any of the nucleic acid molecules disclosed herein, wherein the mammal is mouse, rat, rabbit, cow, sheep, pig, or primate.

[0290] 243. Also disclosed are animals produced by the process of adding to the animal any of the cells disclosed herein.

[0291] 244. Also disclosed are any compounds produced by identifying them using the disclosed methods and compositions and then synthesizing the identified compound or admixing the identified compound with a pharmaceutical carrier.

[0292] E. Methods of using the Compositions

[0293] 1. Methods of Gene Modification and Gene Disruption

[0294] 245. The disclosed compositions and methods can be used for targeted gene disruption and modification in any animal that can undergo these events. Gene modification and gene disruption refer to the methods, techniques, and compositions that surround the selective removal or alteration of a gene or stretch of chromosome in an animal, such as a mammal, in a way that propagates the modification through the germ line of the mammal. In general, a cell is transformed with a vector which is designed to homologously recombine with a region of a particular chromosome contained within the cell, as for example, described herein. This homologous recombination event can produce a chromosome which has exogenous DNA introduced, for example in frame, with the surrounding DNA. This type of protocol allows for very specific mutations, such as point mutations, to be introduced into the genome contained within the cell. Methods for performing this type of homologous recombination are disclosed herein.

[0295] 246. One of the preferred characteristics of performing homologous recombination in mammalian cells is that the cells should be able to be cultured, because the desired recombination event occur at a low frequency.

[0296] 247. Once the cell is produced through the methods described herein, an animal can be produced from this cell through either stem cell technology or cloning technology. For example, if the cell into which the nucleic acid was transfected was a stem cell for the organism, then this cell, after transfection and culturing, can be used to produce an organism which will contain the gene modification or disruption in germ line cells, which can then in turn be used to produce another animal that possesses the gene modification or disruption in all of its cells. In other methods for production of an animal containing the gene modification or disruption in all of its cells, cloning technologies can be used. These technologies generally take the nucleus of the transfected cell and either through fusion or replacement fuse the transfected nucleus with an oocyte which can then be manipulated to produce an animal. The advantage of procedures that use cloning instead of ES technology is that cells other than ES cells can be transfected. For example, a fibroblast cell, which is very easy to culture can be used as the cell which is transfected and has a gene modification or disruption event take place, and then cells derived from this cell can be used to clone a whole animal.

[0297] 2. Method of Treating Cancer

[0298] 248. The disclosed compositions can be used to treat any disease where uncontrolled cellular proliferation occurs such as cancers and the uncrontrolled proliferartion is related to AR activity, for example prostate cancer.

### F. EXAMPLES

[0299] 249. The following examples are put forth so as to provide those of ordinary skill in the art with a complete disclosure and description of how the compounds, compositions, articles, devices and/or methods claimed herein are made and evaluated, and are intended to be purely exemplary of the invention and are not intended to limit the scope of what the inventors regard as their invention. Efforts have been made to ensure accuracy with respect to numbers (e.g., amounts, temperature, etc.), but some errors and deviations should be accounted for. Unless indicated otherwise, parts are parts by weight, temperature is in ° C. or is at ambient temperature, and pressure is at or near atmospheric.

### 1. Example 1

[0300] a) Results

[0301] 250. To dissect the divergent effects of IL-6 in prostate tumor growth, Qui, Y. et al., Nature 393, 83-85 (1998); Hobisch, A. et al., Cancer Res. 58, 4640-4645 (1998); Ritchie, C. K. et al., Endocrinology 138, 1145-1150 (1997), the potential influences of IL-6 on the transactivation of AR, the master regulator of the prostate tumor growth were studied. Chang, C. et al., Science 240, 324.326 (1988); Chang, C. et al., Crit. Rev. Eukaryotic Gene Expression 5, 97-125 (1995). Because IL-6 has two major signal cascades, mitogen-activated protein kinase (MAPK) and phosphatidylinositol 3-kinase (PI3K), Qui, Y. et al., Nature 393, 83-85 (1998); Qui, Y. et al., Proc. Natl. Acad. Sci. USA 95, 3644-3649 (1998), inhibitors were applied to specifically block one of these two IL-6 signal pathways. DU145 cells were transfected for 24 h with AR and MMTV-CAT reporter gene. After transfection, the cells were serum starved for 24 h. Next, 20 μM LY294002, P098059 or vehicle was added to serum-free medium 30 min prior to IL-6 treatment. After 30 min of treatment with IL-6, dihydrotestosterone (“DHT”) was added for another 24 h. The cells were then harvested and AR transactivation was measured by CAT activity. When none of the MAPK and PI3K pathways was blocked, IL-6 had a very limited effect on AR transactivation in the human prostate cancer DU145 cells (FIG. 1a). IL-6 could enhance AR transactivation via the MAPK pathway when the PI3K pathway was inhibited by LY294002 (FIG. 1a, lanes 6-8). Vlahos, C. J. et al., J. Biol. Chem. 269, 5241-5148 (1994). Alternatively, IL-6 could repress AR transactivation via the PI3K pathway when the MAPK pathway was inhibited by P098059 (FIG. 1a, lanes 10-12). Alessi, D. R. et al., J. Biol. Chem. 270, 27489-27494 (1995).

[0302] 251. IL-6's effect on PI3K activity was tested. After serum starvation for 24 h, LNCaP, PC-3 or DU145 cells were treated with 50 μg/ml IL-6 for 30 minutes. The cells were then harvested. PI3K activity was measured by using phosphatidylinositol (PT) as a substrate. IL-6 was found to increase PI3K activity in prostate LNCaP, PC-3 and DU145 cells. It was demonstrated that this increase in PI3K activity by IL-6 in prostate LNCaP, PC-3 and DU145 cells could be repressed by LY294002 (FIG. 1b); The effect of Δp85, a dominant-negative form of a PI3K subunit, Hara, K. et al., Proc. Natl. Acad. Sci. USA 91, 7415-7419 (1994), in DU145 cells was examined. After 24 h transfection, the DU145 cells were treated with vehicle or LY294002 for 30 min prior to DHT treatment. The transactivation was measured by CAT activity. It was found that Δp85 could enhance AR transactivation in a dose-dependant manner in the presence of androgen (FIG. 1c). When the effect on AR transactivation by p110, the constitutively active form of PI3K, Hu, Q. et al., Science 268, 100-102 (1995), was tested in the same manner, a dose-dependent repression of AR transactivation by p110 was observed (FIG. 1d). Together, the results described in FIG. 1 provide strong evidence that IL-6 can repress AR transactivation via the PI3K pathway.

[0303] 252. Focus then turned to the two major downstream effectors of PI3K: a serine/threonine kinase (Akt/PKB) and a ribosomal S6 kinase (p70S6k). Franke, T. F. et al., Cell 88,435-437 (1997). The DU145 cells were treated with LY294002 or rapamycin, an inhibitor of p70S6k, Seufferlei, T. et al., Cancer Res. 56, 3895-3897 (1996), for 30 min prior to DHT treatment. The transactivation activity was determined after 24 h transfection. The suppression of AR transactivation by PI3K was not influenced by the addition of rapamycin (FIG. 2a, lane 3 vs 6), indicating the PI3K-repressed AR transactivation might not function through the p70S6k pathway.

[0304] 253. As shown in FIG. 2a, the data first showed the DHT-induced AR transactivation could be repressed by p110 (FIG. 2a, lane 2 vs 3). However, the addition of dAkt, a dominant-negative of Akt/PKB, Franke, T. F. et al., Cell 81,727-736 (1995), reversed the p110-repressed AR transactivation (FIG. 2a, lane 3 vs 4). The data also demonstrated that the LY294002-induced AR transactivation could be repressed by the addition of cAkt, a constitutive active form of Akt/PKB (FIG. 2a, lane 8 vs 9). Franke, T. F. et al., Cell 81,727-736 (1995). Furthermore, cAkt alone could also inhibit the DHT-induced AR transactivation FIG. 2a, lane 9 vs 10). FIG. 2b summarizes the suppression of AR transactivation through Akt/PKB by showing that cAkt could repress AR transactivation in a dose-dependant manner and dAkt could also induce AR transactivation in a dose-dependent manner. Together, the data from three different approaches described in FIG. 2 clearly demonstrated that Akt/PKB, but not p70S6k, is the downstream target to mediate PI3K-repressed AR transactivation.

[0305] 254. Co-immunoprecipitation was used to demonstrate that Akt/PKB could interact directly with the AR. Cell lysates were immunoprecipitated (IP) with anti-Akt/PKB or normal IgG (N-IgG). The immunoprecipitated complexes were immunoblotted (IB) with AR antibody (NH27) or anti-Akt/PKB antibody, respectively. It was found that the anti-Akt/PKB antibody-precipitated complex from LNCaP whole cell extract contains the AR. This indicates that the AR can interact with Akt/PKB in vivo. Two purified E. coli expressed AR peptides that cover most of the N-terminal and DNA-binding domains (N-DBD, aa 36-643), or the DBD and ligand-binding domains (DBD-LBD, aa 553-918), were then used as the substrates for Akt/PKB. More specifically, 1 μg -DBD AR or 1 μg DBD-LBD AR purified from E. coli was treated for 1 h with Akt/PKB or PI3K. Phosphorylation of the AR was detected by separation on 12.5% SDS-PAGE and autoradiography. It was found that the N-DBD AR peptide could be phosphorylated by Akt/PKB. The DBD-LBD AR peptide can also be phosphorylated by Akt/PKB, but to a lesser extent.

[0306] 255. Two putative Akt/PKB phosphorylation consenus sites (RXRXXS/T) have been identified in the AR at Ser210 (RAREAS) and Ser790 (RMRHLS). These two sites were individually mutated from serine to alanine. Expression vectors with wild type AR (wtAR) or either of the two mutant ARs (ARS210A and ARS790A) were transfected into DU145 and assayed for their ability to be phosphorylated by Akt/PKB. More specifically, wtAR, mtARS210A, or mtARS790A was transfected into DU145. After transfection, whole cell extract was immunoprecipitated with the anti-AR antibody, NH27. Half of the precipitated complex was treated with Akt/PKB, [gamma32p] ATP for 2 hand analyzed by SDS-PAGE. The remaining immunoprecipitates were subjected to western blot analysis to verify the equal expression levels of the wtAR and mtARAR constructs. As shown in FIG. 3a, the degree of phosphorylation of ARS210A and ARS790A by Akt/PKB, as compared to wtAR, was reduced significantly, suggesting these two sites could be targets for Akt/PKB phosphorylation.

[0307] 256. A transient transfection assay was used to study the correlation between AR transactivation and the phosphorylation at Ser210 and Ser790. DU145 cells were transfected with plasmids encoding wtAR, mtARS210A or mtARS790S in conjunction with cAkt or dAkt for 24 h. The ligand treatment and transactivation was determined as previously described. The transient transfection assay revealed that the ARS210A transfected cells, but not those with wtAR, no longer possessed cAkt repressed AR transactivation (FIG. 3b, lane 2 vs 3 and lane 7 vs 8). The ability of dAkt to further promote AR transactivation was also reduced significantly in ARS210A cells (FIG. 3b, lane 2 vs 4 and lane 7 vs 9). Conversely, transfection with ARS790A has very little effect on Akt/PKB-mediated repression of AR transactivation (FIG. 3b, lanes 11-14). Together, results described above provide strong evidence that the AR is a downstream target for Akt/PKB. In addition, Ser210 of AR, but not Ser790, could be the essential phosphorylation target for the Akt/PKB-repressed AR transactivation.

[0308] 257. Recent studies of steroid receptor mechanism suggested that steroid receptors might need coactivators for their proper or maximal transactivation. Onate, S. A. et al., Science 270, 1354-1357 (1995); Voegel, J. J. et al., EMBO J. 15, 3667-3675 (1996); Yeh, S. et al., Proc. Natl. Acad. Sci. USA 93, 5517-5521(1996); Yeh, S. et al., Proc. Natl. Acad. Sci. USA 95, 5527-5532 (1998); Fujimoto, N. et al., J. BioI. Chem. 274, 8316-8321 (1999); Miyamoto, H. et al., Proc. Natl. Acad. Sci. USA 95 11083-11088 (1998); Kang, H. Y. et al., J. BioI. Chem. 274, 8570-8576 (1999); Yeh, S. et al., Biochem. Biophys. Res. Commun. 248, 361-367 (1998). To study the molecular mechanism of PI3K-Akt/PKB repression of AR transactivation, a mammalian two-hybrid system was used to determine the potential effects of Akt/PKB on the interaction of AR and ARA70, an AR coactivator that can enhance AR transactivation. Yeh, S. et al., Proc. Natl. Acad. Sci. USA 93, 5517-5521(1996); Yeh, S. et al., Proc. Natl. Acad. Sci. USA 95, 5527-5532 (1998). The DU145 cells were transfected with 2.5 μg GAL4-ARA70 (GAL4DBD fused with ARA70) and 2.5 μg VP16-AR (VP16 fused with AR aa 36-918) followed by treatment with LY294002 or vehicle 30 min prior to DHT treatment. The interaction between AR and ARA70 was determined by CAT assay using pG5CAT as reporter. As shown in FIG. 4a, transient transfection of VP16-AR or GAL4-ARA70, without addition of DHT, showed negligible activity. However, the CAT activity could be induced by co-transfection of AR and ARA70 in the presence of 1 nM DHT (FIG. 4a, lane 1 vs 2). Interestingly, addition of dAkt or LY294002 further enhanced the interaction of AR and ARA70 (FIG. 4a, lane 2 vs 3 and lane 2 vs 6). In contrast, the addition of cAkt interaction between the AR and ARA70 (FIG. 4a, lane 2 vs 5 and lane 6 vs 8). Similar repression effects also occurred when we replaced ARA70 with other AR coactivators, such as ARA54 or TIF2. Kang, H. Y. et al., J. BioI. Chem. 274, 8570-8576 (1999); Voegel, J. J. et al., EMBO J. 15, 3667-3675 (1996). cAkt and dAkt, however, had very little effect on the interaction between GAL4 fused AR-LBD653-918 and VP16-ARA 70 (VP16 fused ARA70), VP16-ARA54, or VP16-TIF2. The MMTV-CAT reporter assay further confirmed that the enhanced AR transactivation by various AR coactivators, such as ARA70, ARA54, TIF2 or SRC-1, Onate, S. A. et al., Science 270, 1354-1357 (1995), could be further promoted in the presence of LY294002 or Δp85 (FIG. 4c). Together, these data indicate the suppression of AR transactivation by PI3K-Akt/PBK can involve the inhibition of interaction between AR and ARAs.

[0309] 258. The findings that only the interaction between VP16-AR₃₆-918 and GAL4-ARA70, but not VP16-ARA70 and GAL4-ARLBD₆₅₃₋₉₁₈ can be repressed by cAkt suggests Akt/PKB may repress the interaction of AR and ARAs through the AR N-terminal domain. This is consistent with the above conclusions that N-terminal Ser210 is the essential phosphorylation site for Akt/PKB. Together, the discovery that phosphorylation of the AR N-terminal by Akt/PKB can repress AR transactivation, through inhibiting the interaction of AR and ARAs, represents a molecular mechanism to explain how phosphorylation can repress AR transactivation.

[0310] 259. The data indicate a signaling pathway by which IL-6 suppresses AR transactivation: IL-6 activation of PI3K activates Akt/PKB, and Akt/PKB phosphorytates the AR on Ser210, inhibiting its transactivation. DHT's effect on IL-6 protein expression in LNCaP cells was tested by treating the cells with 0, 1, 10, or 50 nM DHT for 24 h, followed by 160 nM phorbol-12-myristate-13-acetate (PMA) treatment for an additional 24 h. The IL-6 protein level in the supernatants was then evaluated by BLISA. As shown in FIG. 5a, IL-6 protein expression was reduced by DHT in a dose-dependant manner and addition of hydroxyflutamide (HF), an antiandrogen, could reverse this induction, suggesting AR plays an essential role for this repression.

[0311] 260. Next, the effect of DHT on the IL-6-induced PI3K activity was tested. LNCaP cells were serum starved for 24 h and then were treated with DHT and IL-6 for 30 minutes. PI3K activity was measured using PI as a substrate. As shown in FIG. 5b, addition of DHT could repress PI3K activity significantly in the presence of exogenous IL-6, indicating that DHT's dampening effect on PI3K activity was not only a result of repressing the expression of IL-6. The results in FIG. 5 demonstrate the existence of bidirectional regulation between IL-6 and androgen-AR indicating that androgen-AR could repress the IL-6/PI3K signaling pathway through a feed-back control mechanism. This new signal cascade is summarized in FIG. 6.

[0312] b) Materials and Methods

[0313] (1) Materials.

[0314] 261. DHT was obtained from Sigma. LY294002, PD98059, PMA, and IL-6 were purchased from Calbiochem. Antibodies to Akt and PI3K subunit p85 were from New England Biolabs and Upstate Biotechnology, respectively. NH27 Anti-AR polyclonal antibody was produced as previous described. Chang, C. et al., Crit. Rev. Eukaryotic Gene Expression 5, 97-125 (1995).

[0315] (2) Cell Culture and Transfections.

[0316] 262. The DU145 and PC-3 cells were maintained in Dulbecco's Minimum Essential Medium (DMEM) containing penicillin (25 μg/m1), streptomycin (25 μg/ml), and 5% fetal calf serum (FCS). The LNCaP cells were maintained in RPMI-1640 with 10% FCS. Transfections were performed using the calcium phosphate precipitation method, as previously described. Yeh, S. et al., Proc. Natl. Acad. Sci. USA 93, 5517-5521(1996).

[0317] (3) Site-directed Mutagenesis of AR.

[0318] 263. pSG5-wtAR was used as the DNA mutagenesis template to anneal with mutagenic primers: 5′-AGGGAGGCCGCGGGGGCT-3′ and 5′-AGGCACCTCTCTCAAGAGTT-3′. The mutant strand was synthesized with T4 DNA polymerase and T4 DNA ligase by using the Gene Editor kit (Promega) and was used to transform BMH71-18 muS cells. The plasmid DNAs were isolated from the selection plates and then transformed into JM109 cells. The mutant plasmids were then confirmed by DNA sequencing.

[0319] (4) Immunoprecipitation, Western Blotting, and in vitro AR Phosphorylation.

[0320] 264. The immunoprecipitation and western blotting were performed as previously described. Qui, Y. et al., Nature 393, 83-85 (1998). AR phosphorylation was assayed as described. Yeh, S. et al., Proc. Natl. Acad. Sci. USA. Briefly, PI3K LNCaP cells were stimulated with IL-6 (50 μg/ml) for 30 minutes. Next, PI3K or Akt was immunoprecipitated from the LNCaP cells. The immunoprecipitated PI3K or Akt was incubated with 1 μg purified AR peptide in HEPES buffer containing 20 mM HEPES, pH 7.4, 10 mM MgCl², 10 mM DTT, 2 μM ATP, and 10 μCi [y-³²P]ATP, at room temperature for 1 h. Reactions were stopped by adding an equal volume of 2×SDS loading buffer. SDS-PAGE and autoradiography were then performed.

[0321] (5) PI3K Activity Assay.

[0322] 265. PI3K activity was determined as previously described. Vlahos, C. J. et al, J. Biol. Chem. 269, 5241-5148 (1994).

### 2. Example 2

[0323] Akt Suppresses Androgen-induced Apoptosis by Phosphorylating and Inhibiting Androgen Receptor

[0324] 266. References cited in this example not specifically designated can be found in reference list A. Thus, a number designation of the reference refers to that number reference in Reference A.

[0325] a) Results

[0326] (1) Akt Phosphorylates AR in vitro.

[0327] 267. Because the region surrounding Ser210 (RAREAS) and Ser790 (RMRHLS) in AR conforms to a consensus sequence (RXRXXS/T) of the Akt phosphorylation site, these two Ser sites were mutated to alanine, which cannot be phosphorylated. Expression vectors with wild-type AR (wtAR) or either one of the two mutant ARs (mtAR S210A and mtAR S790A) were then transfected into prostate cancer DU145 cells without endogenous AR and assayed for their ability to be phosphorylated by Akt in vitro. As shown in FIG. 7A, the degree of Akt phosphorylation of mtARS210A and mtARS790A, as compared to wtAR, was reduced significantly, indicating these two sites could be targets for Akt phosphorylation.

[0328] 268. Co-immunoprecipitation was conducted to demonstrate that Akt can interact with the AR in vivo. As shown in FIG. 7B, the anti-Akt antibody-precipitated complex from LNCaP whole cell extract contained the AR indicating that the AR could interact with Akt in vivo. Two purified E. coli. expressed AR peptides that cover most of the N-terminal and DNA-binding domains (N-DBD, aa 36-643) (Yeh et al. (1999) Proc Natl Acad Sci USA 96, 545863), or the DBD and ligand-binding domains (DBD-LBD, aa 553-918) (Yeh et al.), were then used as the substrates for Akt. As shown in FIG. 7C, Akt phosphorylated the N-DBD AR peptide. The DBD-LBD AR peptide could also be phosphorylated by Akt. In contrast, PI(3)K failed to phosphorylate either N-DBD or DBD-LBD, indicating that phosphorylation of AR by Akt is specific.

[0329] (2) Akt Phosphorylates AR in vivo and Inhibits AR Transactivation.

[0330] 269. Activation of Akt by IGF-1 in COS-1 cells can be blocked by LY294002, a specific PI(3)K blocker was demonstrated (FIG. 8A). FIG. 8B further showed that IGF-1 strongly induced AR phosphorylation and its effect was blocked by LY294002, indicating IGF-1 can phosphorylate AR via the PI(3)K/Akt pathway in vivo. Furthermore, FIG. 8C showed that the constitutively active Akt (cAkt) (Franke et al. (1995) Cell 81, 727-36), but not the dominant-negative Akt (dAkt) (Franke et al.), phosphorylated wt AR, but not mutant ARs (mtAR S210A or mtAR S790A), which is in agreement with these in vitro results (FIG. 7A). cAkt and dAkt were then applied to test if phosphorylation of AR by Akt may result in the modulation of AR transactivation. As shown in FIG. 8D, cAkt could repress wtAR transactivation in a dose-dependent manner and dAkt could induce wtAR transactivation in a dose-dependent manner in DU145 cells. The finding that dAkt enhanced the AR transactivation (FIG. 8D) indicates that the endogenous Akt activity might contribute to the suppression of the AR transactivation. Similar results were also observed in PC-3 and LNCaP cells. Modulation of AR transactivation by Akt was further confirmed by using two AR mutants, mtAR S210A and mtAR S790A, in transient transfection assays. As shown in FIG. 8D, while cAkt could still repress wtAR-mediated transactivation, cAkt has less ability to repress mtAR S210A-mediated transactivation (FIG. 8E). The ability of dAkt to further promote AR transactivation was also reduced significantly in mtAR S210A (FIG. 8E). Conversely, transfection with mtAR S790A has very little effect on Akt-mediated repression of AR transactivation (FIG. 8E). Together, data from FIG. 2 indicate that AR is a new substrate for Akt and Ser210, but not Ser790 in AR, could be the essential phosphorylation site to mediate the Akt-repressed AR transactivation. The data (FIG. 8E) show that cAkt can still suppress the mtAR S210A transactivation, and thus also disclosed are mutated sites other than S210 and S790 that contribute to the modulation of AR activity.

[0331] (3) Akt is a Downstream Effector to Mimic PI(3)K Effect on Suppression of AR Transactivation.

[0332] 270. The finding that Akt could phosphorylate and inhibit AR transactivation was further extended to the Akt upstream activator, PI(3)K. In DU145 cells the effect of Δp85, a dominant-negative form of PI(3)K was examined, and found that, in the presence of androgen, Δp85 can enhance AR transactivation in a dose-dependant manner (FIG. 9A). LY294002, an inhibitor of PI(3)K, also showed enhancement of AR transactivation. Taken together, theses results indicate that both LY294002 and Δp85 may be able to interrupt the endogenous PI(3)K activity which negatively regulates AR transactivation. The data also showed that AR transactivation can be repressed by p110* (Hu et al. (1995) Science 268, 100-2), the constitutively active form of PI(3)K in a dose-dependant manner (FIG. 9B).

[0333] 271. That the suppression of AR transactivation by p110* was not influenced by the addition of rapamycin, an inhibitor of a ribosomal S6 kinase (p70S6K) was demonstrated (FIG. 9C). This indicated that the PI(3)K-repressed AR transactivation does not go through the p70S6K pathway. FIG. 9C showed that the dihydrotestosterone (DHT)-induced AR transactivation could be repressed by p110* and the addition of dAkt reversed this p110*-repressed AR transactivation (FIG. 9C). Furthermore, the LY294002-induced AR transactivation could be repressed by the addition of cAkt (FIG. 9C). Together, the data from different approaches described in FIG. 9 demonstrate that the PI(3)K/Akt, but not PI(3)K/p70S6K signaling pathway, can modulate the AR transactivation. As LY294002 has more potent effect on AR transactivation than Δp85 and dAkt, it is also possible that signal pathways other than PI3K/Akt can involve in LY294002 action.

[0334] (4) Suppression of the Interaction Between AR and AR Coregulators by PI(3)K/Akt Pathway.

[0335] Recent studies suggest that steroid receptors might require the presence of coregulators for their proper or maximal transactivation (McKenna et al. (1999) Endocr Rev 20, 321-44; Yeh et al. (1996) Proc Natl Acad Sci USA 93, 5517-21; Yeh et al. (1998) Biochem Biophys Res Commun 248, 361-7). To study the molecular mechanism of PI(3)K-Akt repression of AR transactivation, a mammalian two-hybrid systemwas used to determine the potential effects of Akt on the interaction of AR and ARA70, an AR coregulator that can enhance AR transactivation. GAL4DBD fused to ARA70 aa 176-401 (GAL4-ARA70), and VP16 fused to the AR aa 36-918 (VP16-AR) were transfected into DU145 cells in the presence or absence of cAkt, dAkt, and LY294002. As shown in FIG. 10A, transient transfection of VP16-AR and GALA-ARA70, without addition of DHT, showed negligible activity. However, the chloramphenicol acetyltransferase (CAT) activity could be induced by co-transfection of AR and ARA70 in the presence of 1 nM DHT. Addition of dAkt or LY294002 further enhanced the interaction between the AR and ARA70.

[0336] 272. In contrast, addition of cAkt repressed the AR and ARA70 interaction as well as the LY294002 enhancement of the interaction between the AR and ARA70 (FIG. 10A). Similar repression effects also occurred when ARA70 was replaced with other AR coregulators, such as ARA54 (Kang et al. (1999) J Biol Chem 274, 8570-6) or TIF-2 (McKenna et al. (1999) Endocr Rev 20, 321-44). cAkt and dAkt, however, had very little effect on the interaction between GAL4 fused AR-LBD (aa 653-918) and VP16 fused ARA70 (VP16-ARA70), VP16-ARA54, or VP16-TIF2. Using MMTV-CAT reporter, it was confirmed that the induced-AR transactivation by various AR coregulators, such as ARA70, ARA54, TIF2, or SRC-1 (McKenna et al.), could be further enhanced in the presence of LY294002 or Δp85 (FIG. 10B). Together, these data indicate the suppression of AR transactivation by PI(3)K-Akt can involve the inhibition of AR and ARAs interaction.

[0337] 273. The findings that only the interaction between VP16-AR (aa 36-918) and GAL4-ARA70, but not VP16-ARA70 with GAL4-ARLBD (aa 653-918), can be repressed by cAkt indicate Akt can repress the interaction of AR and ARAs through the AR N-terminal domain. This is consistent with the above conclusion that phosphorylation of the N-terminal Ser210mediates Akt repression of AR transactivation.

[0338] 274. While most data indicate that androgen/AR can be critically involved in the proliferation of prostate cancer (Prehn, R. T. (1999) Cancer Res 59, 4161-4), the opposite roles of androgen/AR in the inhibition of cell growth and promotion of apoptosis are also well documented (Heisler, et al. (1997) Mol Cell Endocrinol 126, 59-73; Yuan et al. (1993) Cancer Res 53, 1304-11). To correlate PI(3)K/Akt suppression of AR transactivation to androgen-induced apoptosis, it was demonstrated that addition of androgen could induce cell apoptosis in prostate cancer cells PC-3(AR)2, PC-3(AR)6, and thymoma SAR-91 cells that were stably transfected with AR (FIG. 11B). Compared to the parent cell line PC-3(M), Western blot analyses indicated PC-3(AR)2, and PC-3(AR)6 cells express similar amounts of AR (FIG. 11A). Addition of hydroxyflutamide (HF), an antiandrogen, showed inhibition of androgen-induced apoptosis, indicating AR plays an essential role in the apoptosis (FIG. 11B). Furthermore, it was found that IGF-1 could repress androgen-induced apoptosis, and this repression could be reversed by the addition of LY294002 (FIG. 11B). We also determined that addition of androgen showed no apoptotic effect in S7MC, the thymoma parent cell line (FIG. 11B), or PC-3(M). Together, FIG. 11 demonstrate that the PI(3)K/Akt pathway can modulate androgen-induced apoptosis and AR can function as a proapoptotic factor in prostate cancer or thymoma cells.

[0339] (5) Suppression of A/AR-induced Apoptosis and p21 Expression by PI(3)K/Akt Pathway.

[0340] 275. As shown in FIG. 12A, 10 nM DHT could induce p21 promoter activity and cAkt could repress p21 expression in a dose-dependent manner in PC-3 cells. In contrast, dAkt enhanced p21 expression in a dose-dependent manner (FIG. 12A). This Akt-regulated p21 protein expression also correlated well with the androgen-induced apoptosis that was suppressed by cAkt in PC-3(AR)6 cells (FIG. 12B). Similar correlations between the PI(3)K/Akt pathway, androgen-induced apoptosis, and p21 expression also occurred in LNCaP cells, which express functional AR. FIG. 12C showed that LNCaP cells stably transfected with dAkt have a 50% reduction in Akt activity that resulted in the considerably enhancement of p21 expression in response to androgen from 2.5 fold to 14.5 fold.

[0341] 276. The expression of p21, again correlated very well with LNCaP cell apoptosis that is induced by 10 nM DHT and 1 nM 12-0-tetradecanoyl phorbol-13-acetate (TPA), the activator of the PKC (FIG. 12D). Addition of HF could then repress this DHT/TPA-mediated apoptosis (FIG. 12D). In contrast, DHT or TPA, per se, had only marginal effects on apoptosis, indicating that DHT and TPA cooperatively induced LNCaP cell apoptosis (FIG. 12D). IGF-1 activation of PI(3)K/Akt pathway partially repressed DHT/TPA-induced apoptosis in LNCaP parent cells, and LY294002 could reverse this IGF-1 suppression (FIG. 12E). In contrast, IGF-1 showed only marginal suppressive effects on DHT/TPA-induced apoptosis in LNCaP cells stably transfected with dAkt. Together, FIG. 12 demonstrates that the PI(3)K/Akt pathway is able to suppress the DHT/TPA-induced apoptosis in LNCaP cells which has positive correlation to the p21 expression.

[0342] b) Materials and methods

[0343] (1) Materials.

[0344] DHT was obtained from Sigma. LY294002, TPA, and IGF-1 were purchased from Calbiochem. Antibodies to Akt, PI(3)K subunit p85, and p21 were from New England Biolabs, Upstate Biotechnology, and Santa Cruz, respectively. The anti-AR polyclonal antibody, NH27, was produced as previously described (McKenna et al. (1999) Endocr Rev 20, 321-44; Yeh et al. (1996) Proc Natl Acad Sci USA 93, 5517-21; Yeh et al. (1998) Biochem Biophys Res Commun 248,361-7). Δp85 was kindly provided by Dr. M. Kasuga (Sakaue et al. (1995) J Biol Chem 12, 11304-9) and p110* was from Dr. L. Williams (Hu et al. (1995) Science 268, 100-2). pCDNA3, cAkt (a constituetively active Akt with a deletion at aa 4-129 replaced with a consensus myristylation domain) and pCDNA3 dAkt (a kinase deficient mutant, K179A) were from Dr. R. Freeman (Crowder, et al. (1998) J Neurosci 18, 2933-43). PC-3(AR)2 and pC-3(AR)6 were from Dr. T. J. Brown (Heisler et al. (1997) Mol Cell Endocrinol 126, 59-73) and thymocytes S7MC and SAR-91 were from R. L. Miesfeld (Chapman et al. (1996) Mol Endocrinol 10, 967-78).

[0345] (2) Cell Culture and Transfections.

[0346] 277. The DU145 and PC-3 cells were maintained in Dulbecco's Minimum Essential Medium (DMEM) containing penicillin (25 U/ml), streptomycin (25 μg/ml), and 5% fetal calf serum (FCS). The LNCaP cells were maintained in RPMI-1640-10% FCS. Transfections were performed using the calcium phosphate precipitation method in PC-3 and DU145, as previously described. Yeh, S., Lin, H. K., Kang, H. Y., Thin, T. H., Lin, M. F. & Chang, C. (1999) Proc Natl Acad Sci U S A 96, 5458-63. LNCaP cells were transfected using SuperFect™ according to standard procedures (Qiagen).

[0347] (3) Site-directed Mutagenesis of AR.

[0348] 278. pSG5-wtAR was used as the DNA mutagenesis template to anneal with mutagenic primers: 5′-AGGGAGGCCGCGGGGGCT-3′ and 5′-AGGCACCTCTCTCAAGAGTTT-3′. The mutant strand was synthesized with T4 DNA polyrerase and T4 DNA ligase using the Gene Editor kit (Promega) and then used to transform BMH71-18 muS cells. The plasmid DNAs were isolated from the selection plates and then transformed into JM109 cells. The mutant plasmids were then confirmed by DNA sequencing.

[0349] (4) Immunoprecipitation, Western Blotting, and in vitro AR Phosphorylation.

[0350] 279. The immunoprecipitation, western blotting, and AR phosphorylation were performed as previously described (Qiu et al. (1998) Nature 393, 83-5). Briefly, immunoprecipitated PI(3)K or Akt from LNCaP cells stimulated with IGF-1 (50 μg/ml) for 30 min, were incubated with 1 μg purified AR peptide in HEPES buffer (20 mM HEPES/pH 7.4, 10 mM MgCl₂, 10 mM DTT, and 2 μM ATP) and 10 μCi [γ-³²P]ATP, at room temperature for 1 h. Reactions were stopped by adding an equal volume of 2×SDS loading buffer and subjected to SDS-PAGE, followed by autoradiography. To confirm that the Akt and PI(3)K used in this experiment are active, the histone 2B (H2B) and phosphatidylyinositol (PI) were utilized as a substrate for Akt and PI(3)K, respectively.

[0351] (5) LNCaP Stable Transfections.

[0352] 280. The LNCaP cells were transfected with pcDNA3 or pcDNA3 dAkt for 24 h. The cells were selected using 300 μg/ml neomycin (GibcoBRL). Individual single colonies were picked and confirmed by western blot analysis.

[0353] (6) Apoptosis Assay.

[0354] 281. The TUNEL assay was performed to measure the cell apoptosis according to the standard procedures (Oncogene Research Products). At least 200 cells were scored for each sample and the data are means±s.d. from three independent experiments.

[0355] (7) In vivo AR Phosphorylation.

[0356] 282. For labeling experiments, COS-1 cells were cultured in DMEM-10% FCS and transfected with PSG5-AR using SuperFect™ according to standard procedures (Qiagen) for 24 h, the medium was changed to phospho-free DMEM-10% FCS containing 200 μCi/ml ortho-[³²P] (New England Nuclear) for 4 h. During the [³²P] labeling, cells were pretreated with ethanol or LY294002 for 30 min, followed by IGF-1 treatment for 2 h Cells were lysed by RIPA buffer, and the total cell lysates were incubated with NH27. The AR immunocomplex was subjected to SDS-PAGE followed by autoradiography.

### 3. Example 3

### From TGF-β Signaling to Androgen Action: Identification of Smad3 as an Androgen Receptor Coregulator in Prostate Cancer Cells

[0357] 283. References cited in this example not specifically designated can be found in reference list B. Thus, a number designation of the reference refers to that number reference in Reference B.

[0358] a) Results

[0359] (1) Enhancement of AR-mediated Transactivation by TGF-β in Different Prostate Cancer Cells.

[0360] 284. To study the potential correlation between androgen and TGF-β in prostate cancer cells, the TGF-β responsive prostate cancer DU145 and PC-3 cells were chosen to examine the effect of TGF-β on androgen-induced mouse many tumor virus (MMTV) promoter activity. Activation of MMTV-CAT activity was achieved by transient transfection of AR in the presence of 10⁻⁸ M DHT (FIG. 13A, lane 1-3) and this AR-mediated transactivation was enhanced by the addition of TGF-β in DU145 cells (FIG. 1A, lane 3 vs 5). Furthermore, this induction was partially blocked by adding TGF-β specific neutralizing antibody (FIG. 13A, lane 5 vs. 6). Similar results were obtained with PC-3 cells, where AR-mediated transactivation was enhanced by TGF-β (FIG. 13B, lane 2 Vs 3-5) and suppressed by the TGF-β specific neutralizing antibody (FIG. 13B, lane 6 vs. 7-10), both in a dose-dependent manner (FIG. 13B). Since western blot analysis indicated PC-3 cells stably transfected with AR, PC-3(AR)2, express similar amounts of AR as compared to LNCaP cells and the increased AR-mediated transactivation by TGF-β did not change the expression level of AR (data not shown), the effect of TGF-β receptors in PC-3(AR)2 was examined. As shown in FIG. 13C, in the presence or absence of androgen, TβRI or TβRII receptor alone have marginal effect on AR mediated transactivation. However, coexpression of TβRI and TβRII receptor, or constitutively active TGF-β type I receptor (TβRI-T204D) could further enhance AR transactivation in the presence of DHT. Taken together, these data indicate TGF-β can cross-talk with the androgen/R pathway without altering the expression of AR.

[0361] (2) Association Between AR and Smad3 in vitro and in vivo.

[0362] 285. Interaction between AR and Smad3, the mediator of TGF-β signaling, is shown herein. The mammalian two-hybrid assay was applied in SW480.7 cells that lack Smad4, but still express Smad1 and Smad3 (Sato et al. (1997) J Biol Chem 272, 17485-94).The results show that DHT, at concentrations greater than 1 nM, promotes the interaction between Smad3 and AR (FIG. 14A, lane 7), indicating that Smad3 is sufficient to interact with AR. To further explore the mechanism underlying this association between AR and Smad3, prostate DU145 cells were treated with TGF-β to determine whether TGF-β was involved. As shown in FIG. 14B, transient transfection of either Gal4-Smad3 or VP16-AR alone showed negligible activity (lane 2-5). The CAT activity was induced when VP16-AR was co-expressed with Gal4-Smad3 in the presence of 10 nM DHT (lane 7, hatched bar). Upon TGF-β stimulation the reporter gene activity was further induced (lane 7, solid bar), however, TGF-β cannot exert this effect in the absence of DHT (lane 6). These results indicate that the association between AR and Smad3 is an androgen-dependent process and TGF-β can further enhance this interaction.

[0363] 286. To further demonstrate the interaction between AR and Smad3, N-terminal Flag-tagged, full-length Smad3 was expressed in PC-3 cells alone or in the presence of wtAR. Cell extracts were prepared and immunoprecipitations were performed using anti-Flag antibodies followed by Western blotting utilizing anti-AR antibodies. In the presence of Flag-Smad3, AR was co-immunoprecipitated with Smad3 both in the presence or absence of 10 nM DHT (FIG. 15A). Next, An In vivo co-immunoprecipitation assay was applied to demonstrate that the endogenous Smad3 is capable of interacting with AR. As shown in FIG. 15B, AR was detected in the Smad3 immunocomplex in the absence or presence of androgen in PC-3(AR)2 but not in PC-3 cells. A similar result was also obtained when we replaced PC-3(AR)2 with LNCaP cells.

[0364] 287. To determine which individual domain of AR can interact with Smad3, GST-Smad3 fusion proteins incubated with various AR deletion mutants (shown in FIG. 15C) were used in pull-down experiments (FIG. 15D). The full-length wtAR could interact with Smad3 both in the presence and absence of 10 nM DHT. While DBD-LBD AR peptides can interact with Smad3, it was found that both DBD AR and LBD AR peptides interact with Smad3 but N-terminal AR peptide failed to interact with Smad3. Furthermore, two AR mutants (mtAR R614H with mutation at the second zinc finger of the DBD and mtAR E708K with mutation at the LBD) were still able to interact with Smad3. These results indicate that AR can contain two independent binding sites located in both DBD and LBD domains to interact with Smad3.

[0365] (3) Roles of Smad3 in AR-mediated Transactivation.

[0366] 288. Smad3 can enhance androgen-induced AR transactivation in SW480.7 cells which are unresponsive to the inhibitory effects of TGF-β. As shown in FIG. 16A, Smad3 increased the ligand-dependent transactivation of AR, indicating that Smad3 was able to function as a positive AR coregulator to enhance AR transactivation. Similarly, the enhanced transactivation function of AR by Smad3 was observed in DU145 cells (FIG. 16B). A C-terminal deletion of 39 amino acids resulted in the loss of the Smad3 enhanced effect of the MMTV-CAT reporter gene in DU145 cells. As previous reports showed that a MH2 region in the C-terminal region of Smad3 is essential for homo-oligomerization and hetero-oligomerization (Massague, J. (1996) Cell 85, 947-50), it is possible that this region is also important for Smad3 to interact with AR and exert its function as an active coregulator for AR.

[0367] (4) Androgen-response Element (ARE) is Important for TGF-β/Smad3-enhanced AR Transactivation.

[0368] 289. To test whether the ARE is important for TGF-β and Smad3 to enhance AR-mediated transactivation, DU145 cells were transiently transfected with MMTV and PSA, two of the AR target natural promoters, and one synthetic promoter, tyrosine aminotransferase (TAT)₂, which contains only two copies of a synthetic ARE. As shown in FIG. 17A and 17B, increasing AR led to a higher degree of transactivation in a DHT-dependent manner and TGF-β and Smad3 were able to further enhance both the natural and synthetic ARE promoters.

[0369] 290. To rule out any indirect effects on the basal activity of the MMTV-ARE CAT reporter, the ARE DNA fragment from our reporter (MMTV-ΔARE-CAT) was removed. The results showed that TGF-β and Smad3 could not induce any activity. Taken together, these results indicate that the ARE is essential for TGF-β/Smad3 to exert their influence on AR transactivation.

[0370] (5) Effect of Smad3 on the Transactivation of the Progesterone Receptor, Vitamin D Receptor (VDR), Estrogen Receptor, wtAR, and mtAR.

[0371] Several identified coregulators, such as SRC-1 (Onate et al. (1995) Science 270, 1354-7), CBP/p300 (Kamei et al. (1996) Cell 85,403-14) and GRIP1/TIF2 (Hong et al. (1996) Proc Natl Acad Sci USA 93, 4948-52; Voegel et al. (1996) Embo J 15, 3667-75), enhance the transactivation of most steroid receptors. It is therefore important to investigate whether Smad3 can function as a general coregulator for other steroid receptors through their cognate ligands and response elements in prostate cells. Among all the classic steroid receptors tested, Smad3 could significantly enhance the transactivation of AR, the progesterone receptor, and VDR (FIG. 18A). This data is also in agreement with the previous report showing Smad3 can interact with VDR and enhance VDR target genes (Yanagisawa et al. (1999) Science 283, 1317-21). Since androgen signal pathway is opposite of the Vitamin. D signal pathway in the modulation of prostate cell growth, Identification of Smad3 as an AR positive coregulator can provide an explanation for TGF-β signals in androgen-mediated prostate cancer cell growth.

[0372] 291. It is thought that prostate cancer progresses from an androgen-dependent to an androgen-independent stage via mutations in AR which change the specificity and sensitivity of AR to antiandrogens, such as HF (Miyamoto et al. (1998) Proc Natl Acad Sci USA 95, 7379-84). Results from DU145 cells show that wtAR responded well to DHT at 10 nM, and Smad3 enhanced this transactivation to another 3-4 fold (FIG. 18B). On the other hand, wtAR was only able to respond marginally to 1 μM HF and 10 nM E2, but Smad3 could further promote the wtAR transactivation in the presence of 1 μM HF and 10 nM E2. These findings were extended to the AR mutant; mtARt877a, which is found in many prostate tumors and LNCaP cells (Gaddipati et al. (1994) Cancer Res 54, 286-14). Previous reports showed that LNCaP mtARt877a could be stimulated by E2, progesterone, and flutamide (Gaddipati et al. (1994) Cancer Res 54, 286-14). In comparison, this data showed mtARt877a responded much better to HF and E2 than wtAR (FIG. 18C). Furthermore, Smad3 could promote this E2- or HF-mediated androgenic activity on mtARt877a. Compared to the previously identified coregulator, ARA70, Smad3 showed a relatively stronger enhancement effect on the AR transactivation. Together, these results indicate that SMAD 3 enhances the DHT-, E2-, or HF-mediated transactivation in LNCaP AR cells.

[0373] (6) AR-induced PSA Expression is Enhanced by Smad3.

[0374] 292. A previous study reported that plasma TGF-β was significantly elevated in patients with clinically evident prostate metastases and correlated with PSA levels (Ivanovic et al. (1995) Nat Med 1, 282-4; Adler et al. (1999) J Urol 161, 182-7. Therefore, it is important to investigate the effect of Smad3 on androgen-induced PSA expression in order to understand the mechanism of prostate carcinoma progression. As shown in FIG. 17, increasing AR induced PSA reporter gene activity in a DHT-dependent manner and TGF-β or Smad3 were able to further enhance PSA promoter activity. Using Northern blot analysis, the data shows that endogenous PSA expression in LNCaP cells can also be induced by DHT. Addition of Smad3 can further enhance PSA expression in the presence of androgen (FIG. 19A, lane 2 vs. 3). As a control, the data also demonstrated that addition of Smad3 failed to induce PSA expression in the absence of androgen (FIG. 19A, lane 1 vs. 4). Furthermore, this Smad3-enhanced PSA induction can be partially repressed by HF, indicating that Smad3 can play positive roles in enhancing PSA expression via cooperation with AR in the presence of androgen.

[0375] b) Materials and Methods

[0376] (1) Chemicals and Plasmids.

[0377] 293. DHT, dexamethasone, progesterone, and E2 were obtained from Sigma, and hydroxyflutamide (HF) from Schering, USA. pSG5-wild type AR (wtAR), pCMV-AR, and pCMV-mtARt877a (mutant AR derived from the prostate cancers, codon 877 mutation threonine to alanine) were used in our previous report (4). Expression plasmids for glutathione S-transferase (GST)-Smad3 and full-length cDNAs of human Smad3, were kindly provided by Rik Derynck (28). TβRI, TβRII receptors and constitutively active TGF-β type I receptor (TβRI-T204D) expression vectors were provided by Dr. Jeffery L. Wrana (Wrana et al. (1994) Nature 370, 341-7).

[0378] (2) Cell Culture and Transfections.

[0379] 294. Human prostate cancer DU145 cells and PC-3 cells were maintained in Dulbecco's Minimum Essential Medium containing penicillin (25 U/ml), streptomycin (25 μg/ml), and 5% fetal calf serum Transfections were performed using the calcium phosphate precipitation method and cells were harvested after 24 hours for the chloramphenicol acetyltransferase (CAT) assay, as described previously (Fujimoto et al. (1999) J Biol Chem 274, 8316-21). The CAT activity was visualized and quantitated by STORM 840 (Molecular Dynamics). At least three independent experiments were carried out in each case. The SW480.7 cells and PC3 (AR)2 cells are the gifts from Dr. Eric J. Stanbridge and Dr. T. J. Brown.

[0380] (3) GST Pull-down Assay.

[0381] 295. Fusion proteins of GST-Smad3 and GST-AR, and GST protein alone were obtained by transforming expressing plasmids into BL21 (DE3) pLysS strain competent cells followed with 1 mM IPTG induction. GST-fusion proteins then were purified by Glutathione-Sepharose™ 4B (Pharmacia). The AR and Smad3 proteins labeled with [³⁵S] were generated in vitro by using the TNT-coupled reticulocyte lysate system (Promega). For the in vitro interaction, the glutathione-Sepharose bound GST-proteins were mixed with 5 μl of [³⁵S]-labeled TNT proteins in the presence or absence of 1 μM DHT at 4° C. for 3 h. The bound proteins were separated on an 8% SDS-polyacrylamide gel and visualized by using autoradiography.

[0382] (4) Mammalian Two-Hybrid Assay.

[0383] 296. The mammalian two-hybrid system mainly followed the protocol of Clontech (California), with some modifications. Human prostate cancer DU145 cells were transiently co-transfected with Gal4-Smad3 expression plasmid, VP16-AR expression plasmid, and pG5CAT reporter plasmid in the presence or absence of 1 nM DHT. CAT assays were performed as described above.

[0384] (5) Co-immunoprecipitation of AR and Smads.

[0385] 297. PC-3 Cells were co-transfected with AR and FLAG-Smad3 for 16 h, and then treated with vehicle or 10 nM DHT for another 16 h. LNCaP and PC3(AR)2 cells were treated with vehicle or 10 nM DHT for 16 h. The cells were lysed and incubated with monoclonal anti-FLAG antibody (Sigma), polyclonal Smad3 antibody (Santa Cruz), or control IgG at 4° C. for 2 h depending on the experimental design, followed by addition of protein A/G beads (Santa Cruz) for 1 h at 4° C. The bound proteins were separated on an 8% SDS-polyacrylamide gel and blotted with polyconal AR antibody (NH27), Smad3 antibody or anti-FLAG antibody. The bands were detected using an alkaline phosphatase detection kit (Bio-Rad).

[0386] (6) Northern Blot Analysis.

[0387] 298. The blot containing approximately 20 μg of total RNA from LNCaP cells was transfected with Smad3 for 16 h, followed by DHT treatment for another 16 h. PSA expression level was determined by hybridizing with a probe from exon 1 of the PSA gene and labeled with [α-³²P] dCTP. A β-actin probe was used as a control for equivalent RNA loading.

### 4. Example 4

### PTEN Tumor Suppressor Interacts with and Promotes Degradation of Androgen Receptor

[0388] 299. References cited in this example not specifically designated can be found in reference list C. Thus, a number designation of the reference refers to that number reference in Reference C.

[0389] a) Results

[0390] (1) PTEN Suppresses AR Transactivation Involving the Pathway Other than PI3K/Akt.

[0391] The effect of the PTEN on AR transactivation using mouse mammary tumor virus-luciferase (MMTV-luc) as an AR reporter was determined. PTEN repressed AR transactivation 4 fold in AR-positive LNCaP cells, but only less than 2 fold in AR negative DU145 and PC-3. PTEN C124S, a PTEN mutant without phosphatase activity (Wu et al. (1998) Proc Natl Acad Sci USA 95, 15587-91; Furnari et al. (1998) Cancer Res 58, 5002-8; Furnari et al. (1997) Proc Natl Acad Sci USA 94, 12479-84; Myers et al. (1998) Proc Natl Acad Sci USA 95, 13513-8), only showed a slight effect on AR transactivation in all cells tested (FIG. 20A). A similar result was obtained when the effect of PTEN on AR endogenous target gene by Northern blot analysis was tested. As shown in FIG. 20B, androgen induced the prostate-specific antigen (PSA) mRNA expression in LNCaP cells, and this induction was subsequently repressed by PTEN. However, PEN C124S only showed a slight inhibition. The inability of PTEN C124S to repress AR transactivation (FIG. 20A and 20B) indicates the phosphatase activity is important for PTEN function.

[0392] Two different promoters containing androgen response elements (AREs) [MMTV 5′ promoter and 4 copies of synthetic AREs (ARE)4] were used in a reporter gene assay to determine whether the effects of PTEN on the AR transactivation depend on the PI3K/Akt pathway. As shown in FIG. 20C, PTEN suppressed AR transactivation in both luciferase reporters at a similar level. The constitutively active form of Akt (cAkt) (Burgering et al. (1995) Nature 376, 599-602; Crowder et al. (1998) J Neurosci 18, 2933-43), like PTEN, could also suppress the AR transactivation (FIG. 20C). In contrast, a dominant-negative Akt (dakt) (Crowder et al.) and LY294002, a PI3K inhibitor, enhanced AR transactivation in both MMTV-Luc and (ARE)4-Luc. However, cAkt only slightly reversed the PTEN effect on AR transactivation, suggesting that the pathway other than PI3K/Akt is also involved (FIG. 20C). The Northern blot assay further confirmed this result. As shown in FIG. 20D, 10 nM DHT induced PSA mRNA expression in LNCaP cells and addition of LY294002 slightly enhance PSA mRNA, expression. Similar to the reporter gene assay, cAkt did not significantly reverse the PTEN effect on androgen-induced PSA expression (FIG. 20D). For controls, the potential effects of dAkt, cAkt, and LY294002 on the estrogen receptor (ER) transactivation were tested. Results from FIG. 20E showed that cAkt enhanced ER transactivation and dAkt as well as LY294002 suppressed ER transactivation. As these results are in agreement with a recent publication (Campbell et al. (2001) J Biol Chem 276, 9817-24), this can also indicate that the reagents (cAkt, dAkt, and LY294002) used were correct. Addition of cAkt with PTEN only slightly relieved PTEN-suppressed AR transactivation (FIG. 20C), indicates the relevant PTEN-AR pathway is different.

[0393] (2) PTEN Interacts with AR in vitro and in vivo.

[0394] 300. To further dissect the potential mechanisms by which PTEN can suppress AR transactivation, PTEN's ability to directly interact with AR wwas tested. The glutathionine-S-transferase (GST) pull-down assay results indicated that PTEN could interact with AR in the presence or absence of androgen (FIG. 21A). Among several nuclear receptors tested, it was found that PTEN binds preferentially to AR and the ER, but not to the glucocorticoid receptor (GR), the progesterone receptor (PR), or the retinoid-X receptor (RXR) (FIG. 21A).

[0395] 301. To map the AR interaction domains, a set of serial deletions of PTEN were constructed for the GST pull-down assays. The AR was able to interact with GST-PTEN-#2 (aa, 107-252), where the phosphatase domain is located, but not with GST-PTEN-#1 (aa, 1-107) or GST-PTEN-#3 (aa, 253-403) (FIG. 21B & 21C). Further peptide mapping revealed that the peptide (aa, 110-163, named as PTEN-PTP) containing the phosphatase domain, could interact well with AR (FIG. 21C).

[0396] 302. Studies of the PTEN interacting domain on AR indicated that the AR-DBD (aa, 486-651), and AR-DBD plus LBD (AR-DBD-LBD) (aa, 552-918), were able to bind PTEN, but not the AR amino-terminal region (AR-N) (aa, 34-560) or AR-LBD (aa, 666-918) (FIG. 21D & 21E). These GST pull-down assay results can therefore indicate that the phosphatase domain within PTEN interacts with the AR in the DBD and hinge region (aa, 552-651). N-terminal-taged six histidines in front of AR-N-terminal plus DBD (His-AR-N-DBD) were used to examine whether it can bind to soluble PTEN or PTEN C124S. The His-AR-N-DBD, which contains DBD that binds to PTEN, was expressed in bacteria, purified with the nickel (Ni²⁺) column, and incubated with the in vitro expressed [³⁵S]-PTEN and [³⁵S]-PTEN C124S. As shown in FIG. 22F, the PTEN could bind AR-N-DBD strongly, whereas the PTEN mutant dramatically decreased the ability to interact with AR-N-DBD. These results correlated well with the suppression of AR transactivation by PTEN, but not by PTEN C124S (FIG. 20A), and suggested that interaction between PTEN and AR might play important roles in the PTEN-mediated suppression of AR transactivation. As the phosphatase region of PTEN is frequently mutated in primary tumors (Lee et al. (1999) Cell 99, 323-34), mutations in this region can result in the loss of its ability to bind to and modulate AR, which can then contribute to the deregulated cancer growth.

[0397] The interaction between AR and PTEN was further confirmed by co-immunoprecipitation. For this purpose, it was established PTEN-stable LNCaP cells by doxycycline (Dox)-inducible system. Dox treatment induced expression of PTEN and PTEN C124S in several clones (PTEN-C1, PTEN-C2, PTEN C124S-C4, and PTEN C124S-C8, FIG. 22A). FIG. 22B showed that PTEN could be co-immunoprecipitated with AR in PTEN-C1 cells. To rule out the possibility that PTEN antibody may cross-react with AR, LNCaP cells, which express AR but not PTEN, were applied to demonstrate that PTEN antibody did not pull-down AR (data not shown). To further prove the endogenous PTEN can interact with the endogenous AR in the prostate cancer cell line, the CWR22 cell line (Amler et al. (2000) Cancer Res 60, 6134-41; McDonald et al. (2000) Cancer Res 60, 2317-22), an androgen-dependent cell line isolated from human prostate tumors, which expresses both AR and PTEN (FIG. 22C), was applied for co-immunoprecipitation. The results showed that AR was detectable in the PTEN immunoprecipitated complex (FIG. 22C) and PTEN could also be detected in the AR immunoprecipitated complex (FIG. 22D). These results indicate that endogenous PTEN can interact with endogenous AR under the physiological condition in prostate cancer cells. PTEN and AR interaction was further confirmed by colocalization studies. As shown in FIG. 23A, the fluorescent FITC stained PTEN was mainly located in the cytosol, but small amounts of PTEN were also found in the nucleus. Similar to the FITC stained PTEN, Texas-RED stained AR was also mainly located in the cytosol in the absence of androgen, but androgen treatment caused AR nuclear translation (FIG. 23A). FIG. 23B further demonstrated that PTEN could colocalize with AR in the presence or absence of androgen. Together, the co-immunoprecipitation, co-localization assay, and GST-pull-down assay demonstrate that PTEN can interact with AR.

[0398] (3) PTEN Decreases AR Protein Levels Via Promotion of AR Degradation.

[0399] 303. Results from transient transfection and Western blot analysis showed that PTEN could reduce AR protein levels in COS-1 cells (FIG. 24A) indicating PTEN effects AR protein stability. To rule out the possibility that PTEN can influence the expression of exogenously transfected AR construct through the promoter region, the expression of endogenous AR in PTEN-stable LNCaP cells was tested. As shown in FIG. 24B, Dox-induced expression of PTEN in LNCaP PTEN-C1 and PTEN-C2 reduced endogenous AR protein levels. In contrast, Dox-induced PTEN C124S expression (PTEN-C124S-C4 and PTEN-C124S-C8) failed to reduce endogenous AR protein levels. Together, the data clearly demonstrate that PTEN can interact with AR and reduce AR protein levels in COS-1 and LNCaP cells. To determine if reduced AR protein levels were due to reduced mRNA expression, a portion of each LNCaP cell lysate was saved for Northern blot analysis. As shown in FIG. 24C, while AR protein levels were reduced by Dox-induced PTEN, the AR mRNA levels normalized by β-actin remained relatively unchanged, indicating that PTEN can reduce the AR protein levels through post-transcriptional modification.

[0400] 304. Pulse-chase labeling was used to study AR protein stability. As shown in FIG. 24D, PTEN clearly reduced the half-life of newly synthesized [³⁵S]-AR 4 to 5-fold and accelerated AR degradation. Interestingly, when PTEN was replaced with either dAkt or LY294002, the results (FIG. 24E) indicated that dAkt and LY294002 did not promote AR degradation. These data strongly indicate that PTEN-AR direct protein-protein interaction can play major roles for the PTEN-promoted AR degradation.

[0401] (4) Interaction Between PTEN and AR Contributes to PTEN-induced Suppression of AR Functions and Apoptosis.

[0402] 305. To further prove PTEN suppression of AR function can go through direct PTEN-AR interaction, the interaction domain within AR (aa; 483-651, named as ARf) was used for functional studies. To determine whether ARf could disrupt the interaction between AR and PTEN, a co-immunoprecipitation assay was preformed. As shown in the FIG. 22E, ARf interacted with PTEN and disrupted the interaction between AR and PTEN in the CWR22 cells. The results further showed that ARf could dramatically reduce PTEN-mediated promotion of AR degradation (FIG. 25A) and PTEN-mediated suppression of AR transactivation (FIG. 25B), indicating that PTEN and AR interaction plays important roles for the PTEN effect on suppression of AR transactivation and promotion of AR degradation. To extend the studies of PTEN on the suppression of AR function, another prostate cancer cell line, CWR22, which expresses functional AR and is growth-dependent on androgen (Amler et al. (2000) Cancer Res 60, 6134-41; McDonald et al. (2000) Cancer Res 60, 2317-22) was used. As shown in FIG. 25C, PTEN dramatically suppressed AR transactivation. Remarkably, ARf could significantly reduce PTEN suppressive effect on AR transactivation (FIG. 25C). These results therefore are in agreement with the results from LNCaP cells (FIG. 25B) and suggest that PTEN can modulate AR functions by its interaction with AR in the various stages of prostate cancers.

[0403] 306. The PTEN tumor suppressor induces cell apoptosis in a variety of cell types including the LNCaP cells. It was hypothesized that suppression of AR activity by PTEN contributes to PTEN-induced apoptosis. To test this hypothesis, the effect of ARf, which could relieve the suppressive effect of PTEN on AR transactivation (FIG. 25B & 25C), on PTEN-induced apoptosis in LNCaP cells by TUNEL assay was studied. As expected, PTEN could induce apoptosis markedly, whereas PTEN C124S showed only a marginal effect (FIG. 25D). ARf markedly reduced PTEN-induced apoptosis (FIG. 25D). The suppressive effect of ARf on PTEN functions was not due to the interference of PTEN phosphatase activity, since ARf showed little influence on the PTEN-mediated inhibition of Akt activity (FIG. 25E). Together, these data clearly indicate that interaction between PTEN and AR contributes to PTEN-induced suppression of AR functions and apoptosis. The results (FIG. 25D) also confirmed an earlier report (Myers et al., 1998) that PTEN-induced cell death could be suppressed by adding cAkt, indicating that the PTEN→PI3K→Akt pathway can also play roles in the mediation of PTEN-induced cell death.

[0404] 307. The PTEN-PTP, which interacts with AR, was included to test its effect on the regulation of AR function. It was found that PTEN-PTP, like the full length PTEN, could promote AR degradation (FIG. 25A) and suppress of AR transactivation (FIG. 25B & 25C). In contrast, PTEN-C124S or PTEN-#1 peptide that does not interact with AR (FIG. 21C), showed only marginal effect on those PTEN functions (FIG. 25A & 25B). These results indicate that interaction of PTEN with AR plays an important role for PTEN action.

[0405] 308. To rule out the possibility that ARf may have nonspecific effects, glioblastoma U87MG cells were used to test the effects of ARf on the PTEN-induced apoptosis in AR-negative cells. Both Western blot assay and AR transactivation assay indicated that AR was undetectable in U87MG cells (data not shown). While PTEN was still able to induce apoptosis in AR-negative U87MG cells, addition of ARf, however, showed only marginal effects on the PTEN-induced apoptosis (FIG. 25F). However, cAkt was able to suppress PTEN-induced apoptosis (FIG. 25F). These results indicate that the effect of ARf on PTEN-induced apoptosis is not nonspecific and requires the intact AR signaling. Together, results from FIG. 6 clearly indicate that PTEN can have two distinct pathways (PTEN→PI3K/Akt and PTEN→AR) to induce apoptosis and interaction of PTEN with AR can play important roles in one of these two pathways in the LNCaP prostate cancer cells.

[0406] b) Materials and Methods

[0407] (1) Material

[0408] 309. pCDNA3 cAkt and pCDNA3 dAkt were from Dr. R. Freeman. LY294002 was from Calbiochem. 5α-dihydrotestosterone (DHT), doxycycline, and MTT were from Sigma. The anti-AR polyclonal antibody, NH27, was produced as previously described (Yeh et al. (1996) Proc Natl Acad Sci USA 93, 5517-21; 162; Yeh et al. (1998) Biochem Biophys Res Commun 248, 361-7). PTEN monoclonal antibody was from Santa Cruz. FITC-conjugated secondary anti-mouse antibody and Texas-RED-conjugated secondary anti-rabbit antibody were from ICN. TNT in vitro protein expression kit was from Promega. pCDNA3-PTEN and pCDNA3-PTEN C 124S were provided by Dr. C. L. Sawyers. pSG5-HA-PTEN was from Dr. W. Sellers. PTEN-#1 and ARf were constructed into pCMV-Flag vector, and PTEN-PTP was constructed in pCMV-HA vector using the polymerase chain reaction (PCR) method. To construct GST-PTEN fragment proteins, appropriate restriction enzymes were used to release PTEN fragments (#1, #2, #3) from pGEM-KG-PTEN (from Dr. F. Furnari) and subcloned into pGEM-KG, pGEX-3×, and pGEX-3× (Amersham Pharmacia), respectively. To construct GST-PTEN-PTP, the PTP fragment was obtained by PCR and inserted into pGEX-3×.

[0409] (2) Cell Culture and Transfections

[0410] 310. The DU145, PC-3, and COS-1 cell lines were maintained in Dulbecco's Minimum Essential Medium (DMEM) containing penicillin (25 U/ml), streptomycin (25 μg/ml), and 10% fetal calf serum (FCS). The LNCaP, U87MG, and CWR22 (a gift from Dr. C. Kao) cells were maintained in RPMI-1640 with 10% FCS. Transfections were performed using the calcium phosphate precipitation method in PC-3 and DU145 cells, as previously described (Yeh et al. (1999) Proc Natl Acad Sci USA 96, 5458-63.) or SuperFect™ in LNCaP, COS-1, and U87MG cells according to standard procedures (Qiagen).

[0411] (3) Apoptosis Assay

[0412] 311. For the apoptosis assay, the cells were transfected with plasmids for 24 h and grown in 0.1% charcol-stripped serum (CDS) media. The apoptosis was determined 2 days after transfection using the TUNEL assay according to the standard procedures (Oncogene). At least 200 cells were scored for each sample and data are means±s.d. from three independent experiments.

[0413] (4) Luciferase Reporter Assays

[0414] 312. The cells were transfected with plasmids in 10% CDS media for 16 h and then treated with ethanol or 10 nM DHT for 16 h. The cells were lysed and the luciferase activity was detected by the dual luciferase assay according to standard procedures.

[0415] (5) GST Pull-down Assay

[0416] 313. GST fusion proteins were purified as described by the manufacturer (Amersham Pharmacia). The purified GST-proteins were resuspended with 100 μl of interaction buffer (20 mM Tris-HCl/pH 8.0, 60 mM NaCl, 1 mM EDTA, 6 mM MgCl₂, 1 mM Dithiothreitol, 8% Glycerol, 0.05% (v/v) NP-40, 1 mM PMSF, and proteinase inhibitors) and mixed with 5 μl of [³⁵S]-labeled TNT proteins in the presence or absence of 1 μM ligands on a rotating disk at 4° C. for 2 h. After extensive washes with NENT buffer, the bound proteins were separated on an 8% SDS-polyacrylamide gel and visualized by autoradiography.

[0417] (6) Immunoprecipitation and Western Blot Analysis

[0418] 314. The immunoprecipitation and Western blotting were performed as previously described (Qiu et al. (1998) Nature 393, 83-5). The cell extracts (1 mg) were immunoprecipitated with the indicated antibody. The immunocomplexes were subjected to 8% SDS-PAGE and immunoblotted with the indicated antibody.

[0419] (7) Immunofluoresence and Microscopy

[0420] 315. The COS-1 cells were plated on 12-mm coverslips and incubated overnight, transfected with pSG5-AR in combination with pCDNA3, pCDNA3 PTEN, or pCDNA3 PTEN C124S in 10% CDS media for 16 h, and then treated with ethanol or 10 nM DHT for another 16 h. The cells were fixed with 4% paraformaldehyde/PBS for 20 min on ice and cells were permeabilized with 100% methanol for 15 min on ice. The following experiments were performed at room temperature. The coverslips were rinsed with PBS twice and incubated in 5% bovine serum albumin (BSA) for 30 min. The primary antibodies against AR and PTEN were added for 1 h and washed with PBS 4 times. The secondary antibodies were added for 1 h and then washed 4 times with PBS, followed by application of the counting medium containing 4,6-diaminodino-2-phenylinodel (DAPI). A FITC-conjugating anti-mouse antibody and a Texas-RED anti-rabbit antibody were used as secondary antibodies. Coverslips were examined by confocal microscope.

[0421] (8) LNCaP Stable Transfections

[0422] 316. For the Dox-inducible system, PTEN or PTEN C124S were released from pGEM-KG-PTEN or pGEM-KG-PTEN C124S using EcoRI digestion and inserted into pBIG2i vector. The LNCaP cells were transfected with pBIG2i vector, pPIB2i PTEN, or pBIG2i PTEN C124S for 24 h. The cells were selected using 100 μg/ml hygromycin. Individual single colonies were picked and grown until 70% confluent, followed by 4 μg/ml Dox treatment for 48 h. The positive clones were confirmed by Western blot analysis.

[0423] (9) Pulse-chase Experiments

[0424] 317. Pulse-chase experiments were performed as described (Lo et al. (1999) Nat Cell Biol 1, 472-8) with some modifications. Briefly, COS-1 cells were transfected with pSG5-AR in combination with pCDNA3 or pCDNA3 PTEN in 10% CDS media for 36 h. Cells were grown under serum starvation conditions for 2 h in methionine/cysteine-deficient medium, and then the cells were pulsed for 45 min with 200 μCi/ml [³⁵S]-methionine/cysteine (NEN). Cells were washed with DMEM twice and incubated with DMEM containing 0.2% CDS along with 10 nM DHT. The cells were lysed by RIPA buffer in the presence of protease inhibitors, followed by immunoprecipitation using AR antibody. The immunocomplexes were subjected to 8% SDS-PAGE, and visualized by autoradiography.

### 5. Example 5

### Differential Modulation of Androgen Receptor Transactivation by the Interaction with Smad3 and Tumor Suppressor Protein Smad4

[0425] 318. References cited in this example not specifically designated can be found in reference list D. Thus, a number designation of the reference refers to that number reference in Reference D.

[0426] a) Results and Discussion

[0427] (1) Repression of Smad3-enhanced AR Transactivation by Smad4 in Different Prostate Cancer Cells

[0428] 319. To study the potential correlation between AR and Smads in prostate cancer cells, prostate cancer PC3-AR2 cells, which were stably transfected with wild type AR (wtAR), were chosen to examine the effect of Smads on androgen-mediated mouse mammary tumor virus (MMTV) promoter activity. Activation of MMTV-CAT activity was achieved by treating with 10⁻⁸ M DHT (FIG. 26A, lane 1 vs. 2) and this androgen-activated transactivation was further enhanced by the addition of Smad3, but not Smad4 (FIG. 26A, lane 3 and 4 vs. 5 and 6). Interestingly, Smad3-enhanced AR transactivation was significantly repressed by adding Smad4 (FIG. 26A, lane 3 vs. 7). Similar results were obtained with LNCaP cells that expressed mutated but functional AR (FIG. 26A). Next, we examined the effect of Smads on AR transactivation by increasing the dose of Smad3, Smad4, and SRC-1 in PC3-AR2 cells. As shown in FIG. 26B, in the presence of Smad3, the addition of Smad4 can result in the suppression of Smad3-enhanced AR transactivation in a dose-dependent manner (FIG. 26B, lane 3 vs. 4, 5, and 6). In the presence of Smad4, AR transactivation was slightly suppressed (FIG. 26B, lane 2 vs. 10) and adding Smad3 could then further suppress AR transactivation (FIG. 26B, lane 10 vs. 11, 12, and 13). Interestingly, in the presence of Smad3 or Smad4, addition of SRC-1 can then increase AR transactivation (lane 3 vs. 7, 8, 9 and lane 10 vs. 14, 15, and 16). Together, these results from reporter assays suggested that the amount of Smad4 available in the cell might have a major influence on the Smad3 effect on the AR transactivation. Whether there is enough Smad4 available in the cells to heterodimerize with Smad3 determines if Smad3 can induce or suppress AR transactivation.

[0429] (2) Suppression of Endogenous AR target gene PSA mRNA Expression by Smad3/Smad4

[0430] 320. To further confirm Smad3/Smad4 suppression effects on AR transactivation and reduce potential artifact effects related to reporter assays, we then applied Northern blot to assay Smad3/Smad4 suppression effect on AR endogeneous target gene, PSA mRNA expression. In LNCaP cells, 10 nM DHT increases PSA mRNA expression (FIG. 26C, lane 1 vs. 2). Addition of Smad3 further enhances DHT-induced PSA mRNA expression (FIG. 26C, lane 2 vs. 3), whereas addition of Smad4 alone has slight suppression of PSA mRNA expression (FIG. 26C. lane 2 vs. 3). Addition of both Smad3 and Smad4 reverses the Smad3-enhanced PSA mRNA expression. Similar results were also obtained with the real-time quantitative RT-PCR assay to measure PSA mRNA expression (Table I ands II and FIG. 26D). Together, FIG. 26C and 26D, all confirmed the above ARE-reporter assays showing that addition of Smad3 alone can enhance AR transactivation and addition of both Smad3 and Smad4 can then suppress AR transactivation.

[0431] (3) Interaction Between AR, Smad3, and Smad4 in vitro and in vivo

[0432] 321. N-terminal Flag-tagged, full-length Smad3 and Smad4 were expressed in PC3-AR2 cells and treated with DHT (or vehicle). Cell extracts were prepared for immunoprecipitations using anti-Flag or anti-AR antibodies. As shown in FIG. 27A, in the presence of Flag-Smads, AR was co-immunoprecipitated with Smads both in the presence or absence of 10 nM DHT. Moreover, FIG. 27B demonstrated that immunoprecipitating against AR can also capture Smads/AR complexes independent of DHT addition. An in vivo co-immunoprecipitation assay was further applied to demonstrate that the endogenous Smad4 immunocomplex in the absence or presence of DHT in PC3-AR2 cells, but not in AR-negative PC-3 or DU145 cells. A similar result was also obtained when we replaced PC3-AR2 with LNCaP cells.

[0433] 322. To dissect which individual domain of AR can interact with Smad4, GST-Smad4 fusion proteins incubated with various AR deletion mutants in pull-down experiments were used. As shown in FIG. 28A, the full-length wtAR, AR-DBD/LBD peptides, and the AR-DBD and AR-LBD peptides, but not the N-terminal AR peptide, could interact with Smad4. Similar results were obtained with GST-AR, which can also bind to Smad3 or Smad4 (FIG. 28B). These results suggest that both DBD and LBD domains of AR may contain binding sites for Smad4 or Smad3 interactions.

[0434] 323. In addition, when GST-Smad3 was incubated with AR and different amounts of Smad4 were added to this protein complex, the full-length wtAR could interact with Smad3. Interestingly, addition of Smad4 can decrease this AR-Smad3 interaction in a dose-dependent manner (FIG. 28C). Previous reports showed that Smad3 can interact with Smad4 (Derynck et al. (1998) Cell 95, 737-740; Zhang et al. (1996) Nature 383, 168-172; Wrana (1998) Miner Electrolyte Metab. 24, 120-130) and results disclosed herein further demonstrated that both Smad3 and Smad4 can interact with AR in the DBD and LBD. It is possible that Smad4 may either compete directly with Smad3 for the same AR binding sites or Smad4 may have a higher binding affinity then Smad3 to bind to AR.

[0435] 324. Next, we examined which region(s) within the Smad4 are important for repression of Smad3-enhanced AR transactivation. As shown in FIG. 4B, addition of Smad3 increased the AR transactivation (lane 2 vs. 3), co-transfection of Smad4 and Smad3 can then repress the Smad3-enhanced AR transactivation (lane 3 vs. 7) in PC-3 cells. In contrast, replacing Smad4 with a Smad4 mutant, with a C-terminal deletion, can only show partial suppression effect (lane 7 vs. 8). On the other hand, a C-terminal deletion of Smad3 resulted in the loss of the

[0436] 325. Smad3 enhanced effect on the AR transactivation (lane 3 vs. 5). As previous reports indicated that the MH2 region of the C-terminal Smad proteins is important for homo-oligomerization and hetero-oligomerization (11), it is possible that the C-terminal region is also important for Smad proteins to interact with AR and exert its function on the modulation of AR transactivation.

[0437] 326. To further dissect the repression domains within the C-terminal region of Smad4, a series of deletion mutants of Smad4 (FIG. 4B), were constructed and tested in the Smad3-enhanced AR transactivation. As shown in FIG. 29C, among all mutants, ΔM4 with a deletion of aa 274-322, has the greatest effect to reverse the Smad4 suppression of Smad3-enhanced AR transactivation, suggesting that the region (aa 274-322) within the C-terminal of Smad4 may play essential roles to repress Smad3-enhanced AR transactivation.

[0438] (4) Transcriptional Repression by Smad3/Smad4 is Associated with Decreasing AR Acetylation

[0439] 327. Previously, p300/CBP was shown to be able to acetylate non-histone proteins including AR and the addition of trichostatin A (TSA), a specific inhibitor of histone deacetylase activity, was shown to induce the androgen-mediated AR transactivation (Fu et al. (2000) J Biol. Chem. 275, 20853-20860; List, et al. (1999) Exp. Cell Res. 252, 471-478; Sharma et al. (2001) Mol. Endocrinol. 15, 1918-1928). Other reports also suggested that some Smads could interact directly with several HDAC1-associated proteins, such as HDAC-1, TGIF, c-ski, and SnoN (Wotton et al. (2001) Curr Top Microbiol Immunol 254, 145-164; Leong et al. (2001) J. Biol. Chem. 276, 18243-18248; Liberati et al. (2001) J. Biol. Chem. 276,22595-22603; Xu et al. (2000) Proc. Natl. Acad. Sci. USA 97, 5924-9), which might play roles in the Smads-mediated transcriptional suppression. Whether repression of AR by Smad3/Smad4 might involve the acetylation of AR, however, remains unknown. It was determined whether TSA had any influence on the Smad3/Smad4-mediated AR transactivation. As shown in FIG. 30A, addition of TSA can enhance AR transactivation in a dose-dependent manner (lane 2 vs. lane 5, 10, and 14). More importantly, addition of TSA can also reverse the Smad3/Smad4-suppressed AR transactivation in a dose-dependent manner in PC3-AR2 cells (lane 3 vs. 7, 11, and 15). A similar effect was also observed when cells were treated with NaB, another specific inhibitor of histone deacetylase. To further determine whether Smad3 and Smad4 could influence the acetylation of AR, immunoprecipitation was performed using an AR-specific antibody on cell extracts derived from PC2-AR2 cells transfected with different Smad expression vectors. The immunoprecipitate was subjected to Western blotting with an anti-acetyl-lysine antibody, AR-specific antibody, or anti-Flag antibody. As shown in FIG. 30B, acetyl-lysine-immunoreactive bands were detected in the AR antibody IP complex, which have the identical mobility to the AR bands, whereas acetyl-lysine-immunoreactivity was decreased when cells were co-transfected with Smad3 and Smad4. Together, these results suggest that Smad3/Smad4 may modulate the endogenous deacetylase that results in the decrease of AR acetylation. The consequence of these events may then result in the suppression of AR transactivation.

[0440] (5) The Effects of Smads on AR Transactivation is Promoter Context and Cell Type Dependent

[0441] 328. Hayes et al. reports that addition of Smad3 in PC-3 and CV1 cells can suppress AR transactivation (Hayes et al. (2001) Cancer Res. 61, 2112-2118), which is in contrast with our earlier report showing Smads can induce AR transactivation in DU145, LNCaP, and SW480·C7 cells (Kang, et al. (2001) Proc. Natl. Acad. Sci. USA 98, 3018-3023). As shown in FIGS. 26 and 27, addition of Smad3 alone can enhance AR transactivation and adding both Smad3 and Smad4 can then suppress AR transactivation in LNCaP and PC3-AR2 cells. It is possible that the amount of endogenous Smad3 and/or Smad4 available in the tested cells may influence the heterodimerization between Smad3 and Smad4. How Smad3/Smad3 and Smad4/Smad4 homodimers as well as Smad3/Smad4 heterodimer interact with the ARE-promoter linked to the reporter could also influence the AR transactivation. In PC-3 cells, two different reporters linked with AR target gene natural 5′ promoters (MMTV and PSA) and two different synthetic AREs (5X-ARE and TAT2-ARE) were tried, and results show that adding Smad3 alone can enhance all these reporters linked with the four different AREs, and adding Smad3/Smad4 together can then reverse these enhancement effects (FIG. 31A). In contrast, when PC-3 cells were replaced with SW480·C7 cells, a cell line deficient in Smad4 (Goyette et al. (1992) Mol. Cell. Biol. 12, 1387-1395), we found that adding Smad3 alone can only enhance MMTV-ARE reporter activity (FIG. 31B, lane 2 vs 3). For the other 3 ARE reporters (PSA-ARE, 5X-ARE, and TAT2-ARE), Smad3 alone has some slight repression (FIG. 31B, lane 8 vs. 9, 14 vs. 15, and 20 vs. 21). Again adding Smad4 and Smad 3 together can then suppress AR transactivation in all these 4 different ARE reporters (FIG. 31B, lane 2 vs. 5, 8 vs. 11, 14 vs. 17, and 20 vs. 23).

[0442] 329. These results, together with previous reports (Hayes et al. (2001) Cancer Res. 61, 2112-2118; Kang et al. (2001) Proc. Natl. Acad. Sci. USA 98, 3018-3023), suggested that the suppression effect by Smad3/Smad4 is consistent and not dependent on either different ARE-promoters or cell type. In contrast, the ability of Smad3 to modulate AR transactivation not only depended on how much it can heterodimerize with Smad4, but may also depend on the context of the ARE promoter and cell type. The detailed mechanisms of how Smad3 and/or Smad4 can modulate AR transactivation, however, remains unclear. One possible mechanism to explain how Smad3/Smad4 can modulate AR transactivation is that after interaction with AR, the complex of Smad3/Smad4/AR may be able to recruit some transcriptional repressors, which may then result in the suppression of AR transactivation via decreasing the acetylation level of AR (FIG. 30). As the p300 coactivator may compete with some HDAC1-associated proteins, such as c-ski or TGIF, for the binding to the MH2 domain of Smad3 (Fu et al. (2000) J. Biol. Chem. 275, 20853-20860) and TGIF have been demonstrated to interact with AR and Sin3A (Luo et al. (1999) Genes Dev. 13, 2196-2206), it will be interesting to test if the c-ski or TGIF has any influence on the Smad3/Smad4-mediated suppression of AR transactivation.

[0443] 330. Furthermore, our data indicated that the MH2 domain within the C-terminal of Smad4 plays important roles to reverse the Smads-enhanced AR transactivation and early reports suggested that the MH2 domain in the Smads played important roles for the homo- or hetero-oligomerization (1-3). Therefore it is possible that Smad3 may either homodimerize with Smad3 or heterodimerize with Smad4 via their MH2 domains. The consequence of such homo- or hetero-oligomerizations can then result in either the induction or suppression of AR transactivation.

[0444] 331. Together, FIG. 32 demonstrates a simple model for the modulation on AR mediated-transactivation by Smad3/Smad4. First, Smad3 may function as a positive coregulator to enhance AR transactivation. As both Smad3 and Smad4 can interact with AR-DBD and AR-LBD, it is likely that Smad4 may directly compete with Smad3 to bind to AR or Smad 3 may have a higher binding affinity to Smad4, as compared to AR binding. The consequence of such multiple interactions among Smad3, Smad4, and AR may then weaken the smad3 coactivator activity tp enhance AR transactivation. Further studies to determine how the control of promoter sequences can influence Smad3 modulation of AR transactivation, and how the ratio between Smad3:Smad4:AR can influence Smads modulation of AR transactivation, may help us to better understand the potential roles of Smad3 and Smad4 in the AR-mediated prostate cancer progression.

[0445] b) Materials and Methods

[0446] (1) Chemicals and Plasmids.

[0447] 332. DHT and hydroxyflutamide from Schering, USA. pSG5-wild type AR (wtAR) and pCMV-AR were used in our previous report (Fu et al. (2000) J. Biol. Chem. 275, 20853-20860). Expression plasmids for glutathione S-transferase (GST)-Smad3 and Smad4 and full-length cDNAs of human Smad3 and Smad4, were kindly provided by Rik Derynck (Zhang et al. (1996) Nature 383, 168-72). Smad4 (G508S), Smad4 (D539H), Smad4 ΔM1, ΔM2, ΔM3 and ΔM4 were provided by Dr. Mark P. de Caestecker. (de Caestecker et al. (2000) J. Biol. Chem. 275, 2115-2122; de Caestecker et al. (1997) J. Biol. Chem. 272, 13690-13696.

[0448] (2) Cell Culture and Transfections

[0449] 333. Human prostate cancer DU145 cells and PC-3 cells were maintained in Dulbecco's Minimum Essential Medium containing penicillin (25 U/ml), streptomycin (25 μg/ml), and 5% fetal calf serum. Transfections were performed using the calcium phosphate precipitation method and cells were harvested after 24 h for the chloramphenicol acetyltransferase (CAT) assay, as described previously (Kang, et al. (1999) J. Biol. Chem. 274, 8570-8576). The CAT activity was visualized and quantitated by STORM 840 (Molecular Dynamics). At least three independent experiments were carried out in each case. The SW480·C7 cells and PC-3(AR)2 cells are the gifts from Dr. Eric J. Stanbridge and Dr. T. J. Brown

[0450] (3) Western Blot Analysis

[0451] 334. Cells were lysed in lysis buffer (50 mM Tris-HCl/pH 7.4, 150 mmol/l NaCl, 1 mmol/l EDTA, 1% NP-40, 0.25% sodium deoxycholate, 1 mM phenylmetlhylsulfonyl fluoride, 1 μg/ml aprotinin, 1 μg/ml leupeptin, 1 μg/ml pepstatin). An aliquot of each sample was used for determination of protein content using the Bradford protein assay reagent. The clarified supernatants were mixed (1:4) with 5× sample buffer (10% sodium dodecyl sulphate (SDS), 0.5M Tris/pH 6·8, 10% glycerol, 1% bromophenol blue, 5% β-mercaptoethanol), transferred to a boiling water bath for 5 min, rapidly frozen on dry ice, and stored at −70° until use. Samples with equivalent amounts of protein were subjected to SDS-PAGE on a 7.5% acrylamide gel. Proteins were transferred to Hybond-P membrane (PVDF transfer membrane) at 100 V, 90 mins. After blocking in TBST buffer (10 mmol/l Tris HCL/pH 7·5, 150 mmol/l NaCl, 0·05% Tween 20) supplemented with 5% non-fat dry milk, blots were incubated with the primary mouse AR antibodies (1:1000 dilution) or anti-flag antibodies (1:1000 dilution), in TBST for 90 min. To demonstrate androgen receptor or anti-flag, blots were incubated with horseradish peroxidase-labeled anti-mouse immunoglobulins for 1 h. Films were developed using the ECL Western blot analysis system from Amersham Pharmacia Biotech.

[0452] (4) GST Pull-down Assay

[0453] 335. Fusion proteins of GST-Smad3 and GST-AR, and GST protein alone were obtained by transforming expressing plasmids into BL21 (DE3) pLysS strain competent cells followed with 1 mM IPTG induction. GST-fusion proteins then were purified by Glutathione-Sepharose™ 4B (Pharmacia). The wtAR and deletion mutant AR (mtAR) proteins labeled with [³⁵S] were generated in vitro using the TNT-coupled reticulocyte lysate system (Promega). For the in vitro interaction, the glutathione-Sepharose bound GST-proteins were mixed with 5 μl of [³⁵S]-labeled TNT proteins in the presence or absence of 1 μM DHT at 4° C. for 3 h. The bound proteins were separated on an 8% SDS-polyacrylamide gel and visualized by using autoradiography.

[0454] (5) Co-immunoprecipitation of AR and Smads

[0455] 336. PC-3 Cells were co-transfected with AR and FLAG-Smad4 and Smad3 for 16 h, and then treated with vehicle or 10 nM DHT for another 16 h. LNCaP and PC-3(AR)2 cells were treated with vehicle or 10 nM DHT for 16 h. The cells were lysed and incubated with monoclonal anti-FLAG antibody (Sigma), polyclonal Smad4 and Smad3 antibodies (Santa Cruz), or control IgG at 4° C. for 2 h depending on the experimental design, followed by addition of protein A/G beads (Santa Cruz) for 1 h at 4° C. The bound proteins were separated on an 8% SDS-polyacrylamide gel and blotted with polyconal AR antibody (NH27), Smad4 and Smad3 antibodies or anti-FLAG antibody. The bands were detected using an alkaline phosphatase detection kit (Bio-Rad).

[0456] (6) Immunoprecipitation

[0457] 337. PC-3(AR)2 and LNCaP Cells were grown in 100-mm culture dishes and treated with vehicle or 10 nM DHT for 24 h. The cells were lysed in EBC (150 mM NaCl, 50 mM Tris-HCl/pH 8.0, 0.5% NP-40, with protease inhibitors). Cell lysates were harvested, and 1 mg of total protein was precleared with 20 μl of protein A/G beads (Santa Cruz) for 2 h at 4° C. The beads were pelleted by centrifugation at 12,000 rpm for 30 sec, and the supernatants were subjected to immunoprecipitation with 5 μl of mouse anti-human AR antibody (BD PharMingen), and 30 μl of protein A/G beads at 4° C. for 2 h. The beads were pelleted by centrifugation; washed five times with NETN buffer (100 mM NaCl, 1 mM EDTA, 20 mM Tris-HCl/pH 8.0. 0.25% NP-40, with protease inhibitors), boiled with 30 μl of 6% SDS-polyacrylamide gel electrophoresis loading buffer for 5 min, and the immunoprecipitated proteins were separated by 10% SDS-polyacrylamide gel electrophoresis. Western blotting of the membrane was performed with the rabbit anti-Smad4 (H-552 Santa Cruz).

[0458] (7) Principle of Real-Time PCR.

[0459] 338. The theoretical basis of the ABI PRISM 7700 Sequence Detection System real time quantitative PCR (Perkin-Elmer Applied Bio systems) is described elsewhere. Fluorescence signal; from each PCR reaction is collected as normalized values plotted versus the cycle number. Reactions are characterized by comparing threshold cycle (C_{T}) values. The C_{T} is a value define the fractional cycle number at which the sample fluorescence signal passes a fixed threshold above base. Quantitative values are obtained from the C_{T} number at which the increase in signal associated with an exponential growth of PCR product starts to be detected (using Perkin-Elmer Bio systems analysis software), according to the manufacturer's manual. The precise amount of total RNA added to each reaction (based on absorbance) and its quality (i.e., lack of extensive degradation) are both difficult to assess. Therefore, we also quantified transcripts of the gene β-actin as the endogenous RNA control, and each sample was normalized on the basis of its β-actin content. The relative target gene expression level was also normalized to the calibrator. The final results, expressed as N-fold differences in target gene expression relative to the β-actin gene and the calibrator termed “N target,” were determined as follows:

N target=2^{-(ΔCTsample-ΔCTcalibrator)}

[0460] where ΔC_{T} values of the sample and calibrator are determined by subtracting the average C_{T} value of the target gene from the average C_{T} value of the β-actin gene.

[0461] (8) Oligonucleotide Primers Design

[0462] 339. The target cDNA sequence was evaluated using the Primer Express software (Perkin-Elmer Applied Bio systems) (table 1). The forward and reverse primers were designed to lie in adjacent exons to prevent amplification genomic DNA that may be contained in samples.

[0463] (9) RNA Extraction

[0464] 340. Total RNA was extracted from LNCap cell lines by using the Trizol (GibcoBRL). The quality of the RNA samples was determined by electrophoresis through agarose gels and staining with ethidium bromide. The 18S and 28S RNA bands were visualized under UV light.

[0465] (10) cDNA Synthesis

[0466] 341. RNA was reverse transcribed in a final volume of 20 ml containing 5×reverse transcriptase buffer (500 mM each dNTP, 3 mM MgCl₂, 75 mM KCl, and 50 mM Tris-HCl/pH 8.3), 0.1 μg of Oligo dT, 10 units of Rnasin inhibitor (Promega, Madison, Wis.), 100 units of MMLV reverse transcriptase (Promega, Madison, Wis.), and 1 mg total RNA. The samples were incubated at 20° C. for 10 min and at 42° C. for 1 h, and reverse transcriptase was inactivated by heating at 95° C. for 5 min and cooling at 5° C. for 5 min.

[0467] (11)PCR Amplification

[0468] 342. All of the PCR reactions were performed using an ABI Prism 7700 Sequence Detection System (Perkin-Elmer Applied Bio systems). PCR was performed using the SYBR Green PCR Core Reagents kit (Perkin-Elmer Applied Bio systems). The amplification reactions were performed in 25 ml final volume containing 10× SYBR buffer, 25 mM of MgCl₂, 12.5 mM of dNTP, 0.625 units of AmpliTaq Gold and 0.25 units UNG. Final AR, PSA and beta-actin forward, reverse concentrations were 2.5 μM. To reduce variability between replicates, PCR premixes, which contained all reagents expect for total RNA, were prepared and aliquoted into 1.5 ml microfuge tubes. The thermal cycling conditions comprised an initial denaturation step at 95° C. for 10 min and 40 cycles at 95° C. for 15 sec and 60° C. for 1 min. Specific PCR amplification products were detected by the fluorescent double-stranded DNA-binding dye SYBR Green core reagent kit (Perkin-Elmer Applied Bio systems). Experiments were performed with duplicates for each data point.

The application's sequence listing, which the Patent Office published only in electronic form, follows.

SEQUENCE LISTING (11 sequences)

SEQ ID NO: 1 - DNA, 4321 bp, Artificial Sequence
  Description of Artificial Sequence:/note = synthetic construct
cgagatcccggggagccagcttgctgggagagcgggacggtccggagcaagcccacaggcagaggaggcgacagagggaaaaagggccgagctagccgctccagtgctgtacaggagccgaagggacgcaccacgccagccccagcccggctccagcgacagccaacgcctcttgcagcgcggcggcttcgaagccgccgcccggagctgccctttcctcttcggtgaagtttttaaaagctgctaaagactcggaggaagcaaggaaagtgcctggtaggactgacggctgcctttgtcctcctcctctccaccccgcctccccccaccctgccttccccccctcccccgtcttctctcccgcagctgcctcagtcggctactctcagccaacccccctcaccacccttctccccacccgcccccccgcccccgtcggcccagcgctgccagcccgagtttgcagagaggtaactccctttggctgcgagcgggcgagctagctgcacattgcaaagaaggctcttaggagccaggcgactggggagcggcttcagcactgcagccacgacccgcctggttagaattccggcggagagaaccctctgttttcccccactctctctccacctcctcctgccttccccaccccgagtgcggagcagagatcaaaagatgaaaaggcagtcaggtcttcagtagccaaaaaacaaaacaaacaaaaacaaaaaagccgaaataaaagaaaaagataataactcagttcttatttgcacctacttcagtggacactgaatttggaaggtggaggattttgtttttttcttttaagatctgggcatcttttgaatctacccttcaagtattaagagacagactgtgagcctagcagggcagatcttgtccaccgtgtgtcttcttctgcacgagactttgaggctgtcagagcgctttttgcgtggttgctcccgcaagtttccttctctggagcttcccgcaggtgggcagctagctgcagcgactaccgcatcatcacagcctgttgaactcttctgagcaagagaaggggaggcggggtaagggaagtaggtggaagattcagccaagctcaaggatggaagtgcagttagggctgggaagggtctaccctcggccgccgtccaagacctaccgaggagctttccagaatctgttccagagcgtgcgcgaagtgatccagaacccgggccccaggcacccagaggccgcgagcgcagcacctcccggcgccagtttgctgctgctgcagcagcagcagcagcagcagcagcagcagcagcagcagcagcagcagcagcagcagcagcaagagactagccccaggcagcagcagcagcagcagggtgaggatggttctccccaagcccatcgtagaggccccacaggctacctggtcctggatgaggaacagcaaccttcacagccgcagtcggccctggagtgccaccccgagagaggttgcgtcccagagcctggagccgccgtggccgccagcaaggggctgccgcagcagctgccagcacctccggacgaggatgactcagctgccccatccacgttgtccctgctgggccccactttccccggcttaagcagctgctccgctgaccttaaagacatcctgagcgaggccagcaccatgcaactccttcagcaacagcagcaggaagcagtatccgaaggcagcagcagcgggagagcgagggaggcctcgggggctcccacttcctccaaggacaattacttagggggcacttcgaccatttctgacaacgccaaggagttgtgtaaggcagtgtcggtgtccatgggcctgggtgtggaggcgttggagcatctgagtccaggggaacagcttcggggggattgcatgtacgccccacttttgggagttccacccgctgtgcgtcccactccttgtgccccattggccgaatgcaaaggttctctgctagacgacagcgcaggcaagagcactgaagatactgctgagtattcccctttcaagggaggttacaccaaagggctagaaggcgagagcctaggctgctctggcagcgctgcagcagggagctccgggacacttgaactgccgtctaccctgtctctctacaagtccggagcactggacgaggcagctgcgtaccagagtcgcgactactacaactttccactggctctggccggaccgccgccccctccgccgcctccccatccccacgctcgcatcaagctggagaacccgctggactacggcagcgcctgggcggctgcggcggcgcagtgccgctatggggacctggcgagcctgcatggcgcgggtgcagcgggacccggttctgggtcaccctcagccgccgcttcctcatcctggcacactctcttcacagccgaagaaggccagttgtatggaccgtgtggtggtggtgggggtggtggcggcggcggcggcggcggcggcggcggcggcggcggcggcggcggcggcggcgaggcgggagctgtagccccctacggctacactcggccccctcaggggctggcgggccaggaaagcgacttcaccgcacctgatgtgtggtaccctggcggcatggtgagcagagtgccctatcccagtcccacttgtgtcaaaagcgaaatgggcccctggatggatagctactccggaccttacggggacatgcgtttggagactgccagggaccatgttttgcccattgactattactttccaccccagaagacctgcctgatctgtggagatgaagcttctgggtgtcactatggagctctcacatgtggaagctgcaaggtcttcttcaaaagagccgctgaagggaaacagaagtacctgtgcgccagcagaaatgattgcactattgataaattccgaaggaaaaattgtccatcttgtcgtcttcggaaatgttatgaagcagggatgactctgggagcccggaagctgaagaaacttggtaatctgaaactacaggaggaaggagaggcttccagcaccaccagccccactgaggagacaacccagaagctgacagtgtcacacattgaaggctatgaatgtcagcccatctttctgaatgtcctggaagccattgagccaggtgtagtgtgtgctggacacgacaacaaccagcccgactcctttgcagccttgctctctagcctcaatgaactgggagagagacagcttgtacacgtggtcaagtgggccaaggccttgcctggcttccgcaacttacacgtggacgaccagatggctgtcattcagtactcctggatggggctcatggtgtttgccatgggctggcgatccttcaccaatgtcaactccaggatgctctacttcgcccctgatctggttttcaatgagtaccgcatgcacaagtcccggatgtacagccagtgtgtccgaatgaggcacctctctcaagagtttggatggctccaaatcaccccccaggaattcctgtgcatgaaagcactgctactcttcagcattattccagtggatgggctgaaaaatcaaaaattctttgatgaacttcgaatgaactacatcaaggaactcgatcgtatcattgcatgcaaaagaaaaaatcccacatcctgctcaagacgcttctaccagctcaccaagctcctggactccgtgcagcctattgcgagagagctgcatcagttcacttttgacctgctaatcaagtcacacatggtgagcgtggactttccggaaatgatggcagagatcatctctgtgcaagtgcccaagatcctttctgggaaagtcaagcccatctatttccacacccagtgaagcattggaaaccctatttccccaccccagctcatgccccctttcagatgtcttctgcctgttataactctgcactactcctctgcagtgccttggggaatttcctctattgatgtacagtctgtcatgaacatgttcctgaattctatttgctgggctttttttttctctttctctcctttctttttcttcttccctccctatctaaccctcccatggcaccttcagactttgcttcccattgtggctcctatctgtgttttgaatggtgttgtatgcctttaaatctgtgatgatcctcatatggcccagtgtcaagttgtgcttgtttacagcactactctgtgccagccacacaaacgtttacttatcttatgccacgggaagtttagagagctaagattatctggggaaatcaaaacaaaaaacaagcaaacaaaaaaaaaa

SEQ ID NO: 2 - DNA, 16671 bp, Artificial Sequence
  Description of Artificial Sequence:/note = synthetic construct
  misc_feature (0)...(0): n=a, t, c, or g
ctcacgcctgtaatcccagcactttgggatgccaaggtgggaggaatcagctgagatcaggagtttgagaccagcctgaccaacatggataaatcccgtctctactaaaaatacaaaattagccaggcgtgggtggcacatgcctgtaatctcagctactcaggcggttgaggcaggagaattgcttgaacccgggaggcggaggttgcagtgagccaagatggcaccattgcactccagcctgggcaacaagagcgaaactccatctcaaaaacaaagaaaaaaagataatagccatcctaatggatgtgaagtggttcaatgtatatctttttatttgtataacttctttcaaaatgtatataattattttgtgtatatgtaatttgttttacatagtagcattatgctattcctttccctctgtgtcttactattttctgttggaactgtgtttaaaatctatacatttgttttatgtacatggaattcattgcttctcacttttgcatagcactttatggtatgcatgaatcacatccatgtatattgagaacctactatgtgcttgtaccaagctttctatatgatttaatctgattccatacagcaatcctaagaaggtgttgtaattatcacattttatggatgagaaaactgacacacacagagttaaggaacgtgcccagagtcacacagccggaagtggaagaggtagaagtttaacccaggtcattctggtgccacagaagagctcacacgtgtaaggtgttacaaagagctataggtagagatctgactgtagacagaggctctctcttaggtgagggcactctgataaaagttctagtcctgatttggctacttatcttcacagtgcaaatcaccttcccttacagacatcactttctgtctgtgtaagatgaagatgattttaatgctttttctagattcactacttgttgattaaatacccttaagctaatgggaaaataatcagaattgaagtcaggtgtttgtttctttcgtgtatttggagtggctggcctacctgggagccactccaaatacacgaaaaccctctgatgtgtctattcacgaggtgaactgttcataggatggactattcccagggaaacagttgctgtctccacttccatcccacctctcctgaactttgcacttaccatggtgaaaaattaactgggctaatgtttccctcccaaggacaacctctgcaaaagcaggtatggctgggccccaaaagaccaggtgccagaacagagttgtacccatccagagcagcccacccattcactgcccaaagtcaagatcaagagaacatgcagggtcttctcagcactggaagaatcagttcctcagccctcctcagagctttctgaaactggacttagtcccccagtggagggacttctcttggagaaacaggcctgaggagaaagaactagcccagaaatggcacttattagacttgtaggtgggtccagcactatttttctgcatgcacagctgttcttgtcacacggatgccagcagggaagcatggttctgccacactaactagctggctgcctagttatttcctcccctcaggaaaatgagagggctgaatgagggccccttcccataccatgattttacagggtgaagtacctgtcaggtccttctactacatgtaatcctcacatctctctgacgctcttcctctacagtgcaaatcactctccttcagcagacattgctctctctgtaacataaaggacttgaactacaggaggacagttacaatgctctttctggatccaccactctgcacagtgagaaccgcttgctccattcttacagcggagagaacggacgctgcccaaggggaagaagagaaagagccgggattggaagccaggccagtcactgatggatcctgagcccctcttactttctttggctacctctcaatggttggacttgttcaggttaagattaacactttactggacgatgatgactgcaaggcccctgcccatctttgcccactcagtcacatcatcctcatccccaccctttgatgcttctctaggctgtgaacgccttgaaaaccttagtcttttattttggaagttcaggaactgaataggagggctgcaactcagagctgctccgtcaatgtgtgttaaacttatttgacctccctccaccacttttcatggcattagcaatgcaaaccttttcacatgagcttcccacagccaccctaggagatcgcgagggaagccacctctagccccattttacaggtgagcaaataatccttgcagtgttacaacagtgtgcccgtgtagagaactgttttgcaaagagctcgatcaatgatgtcatctttgccttccgtgacccaggcagctgggtgcagtctcaagatcgtagactgaggcttcaacaaagtattgggttcaaattccagctctgccacttggaaccctgagtaagtaatgtaatctctctgtgcctccgtaaacgtgaggcacaggaacatctacctcaccaaccactgttaagactgaatcaaagggcagcaggcggactacccggaatgaagaaagcaatcaataaatgtggattgtgtcatccttgtctctcttgacggacgggaagaggagagtgaaacctaagaccacagcggaagcgcgttaacaggaggaccagcaaggaacggaagccaggttgtcaagcctcagttggctttcacgtattctccttttcaggcgggtatttaggaagagaggagggtgaggagcacagcgcacttctgcagcagcagctgcggattggcttgtgggaggcggttctccggagcaaggcaagggcccctgccgcttctgggctgactgtggattccgccacacctcacagggctttgtaactccccacccacttgagggttccagataactttttttttttaacaaagcaggggtgggggtgggagattcctgctgttaaaaacaaacaaagggcttagacaccggctagtcggctgcgggaggcagcaagagaaaggccgaggggcctggagtagctcctgaaaaccgccgagggccctgcgggcagacgcccctgaattcttttggtggggagaaaagccgcggagctccccaatgtgccaattggtttgttgttgttttgctttttttgaatacacaaactctccgaaaactcctgtcttgccccacttttttgtgagttcattgctttggaaacaaaactctcttccatttattggcaattatcaaatttccgatccttctctatcaggagatccagcaacaaacaccctgttatgtaaatttctttcaaagataaattcgaaagcccctccattcattccttcaagaactcaacagatgtccttgaggctcattttctgccgggcactcggttcacaaggctcaagagacccctggctccagccattgtccaggttgtcactggtgtccccagctctccacttctgaggacccacttctcaccccctcctcctccgcacacgttcccgaggctctcggccggtgtgatctcaccgactagagaataaaaacagcccaggggcgccggcgccggccaagggccttgacggggatcagcaagcgcgaggccaagtgcgggccccaacttcctgggcccgggccttccgcgcgccccctctcgggctcgggtcctctccagggtgcactcgcgtccggacgacgcttacttgctgcgagtccaaccctctccggcccgcaactccaaccgagccgcccgagtgtggactccgagagcggacgccacgggccgcgctcagccctcccgcccgaggcccctctcgccgtgtttcccaggacttcctccccgcgcccgcccgacttcaggtcggggccgcgcagggtcccgcgcgctccagccaggactgccgccgcccgggtcgcccacgtgggcgtgctgggcgcggggtggtggccggccgggcgccctccccggagcagggggcgggcagggcgcccgcgggaggaggtggcgggctgcgggggaggaggcggggagccccggcggcgagggggcggtgacagcacttggaaaggaggctgcacgcggatttgcatgaaacacagactgggagcgggcgggagcgggagcgcggcgcacgccccgggccggcccagccagcgagcgagcgagcggcgagccgggaggaggagggtggcggggcggtgaggccgcagaggcggagggatctgcgcatcaaagctagcgaggcgagcgaagtttggccgggggttggactttccttcccggaggcggcacccaaacagctaccccgtgcggaaacccaaacttctgctgccacttggagtctcgcggccgccgcctccgccccgcgttcggggccttcccgaccctgcactgctgccgtccgcccgcccggccgctcttctcttcgccgtgggagccgctccgggcgcagggccgcgcgccgagccccgcaggctgcagcgccgcggcccggcccggcgccccggcaacttcgccgagagttgaggcgaagtttgggcgaccgcggcaggccccggccgagctcccctctgcgcccccggcgtcccgtcgagcccagccccgccgggggcgctcctcgccgcccgcacgccctccccagccatgtcgtccatcctgcctttcactcccccgatcgtgaagcgcctgctgggctggaagaagggcgagcagaacgggcaggaggagaaatggtgcgagaaggcggtcaagagcctggtcaagaaactcaagaagacggggcagctggacgagctggagaaggccatcaccacgcagaacgtcaacaccaagtgcatcaccatccccaggtgggggcccgcccgggggggacccggggtcacgccggcccagccccctggcactgcggggccgacccagtggggctggagatgggaagagggagagagagggagggagtgagactgtgtgggtgcgtgtgtgtgagagtgggagagcgcgggcaggaagggggtggggggacccaaacaaaaccatctctgatttgcaaagatcagagcccgaggcttccacgcggcactctggcttccacacctcacattccctttccacctccgggaggggagagcgggttgctgcgggactcggccgcccccactccggggagctggggctggaagttgaggcccgctttgttcggctccgcgggccggagcccctcctccgccgccgcctcccgcccccgcggcccgcgctcgtggaggtggtggtgtctttgcgtttcttttcttcagtcgggtctccccactttcctctacaggaatgcggtccgtacagctggggctgtgggtgaggagcgggagcctagtgattgacagattccttcttcgttctttctttgccttcgggattagcatttttatcgagtatttttagactcggttgtgccagtctcccgccccctgagcatgcacgcactttggttgcagtgcaatgctctgacttccaaatgggagagacaagtggcggaaaatagggtcttctcccacctcccacccccccatcccgactcttttgcccttcttttggtccaagagattttgaaaccgtgcagaacgagggagaggggcaggctgcagccgggcagataacaaaacacaccccaaagtgggcctcgcatcggccctcgcattcctgtagagccttccttcccaaagcgcgctgccatctgtctggatctcctttatccttcccgttgcgcgctagctaggtcgggcgggagcacagatggctgatagaaggggtcagtgacttcactcccccagggccttccttagcttagatgtgcctggctgggaactgggggtgcgggtaccttggcttcctatctctacctctcagcctcctttgatgctgaaccaagggagagagcgtgtgtgttgggggctggctcttttgggggtcccaggctgccgaggaatgagtagaaagcaccagggactgtcagccgcaaagggattgtcatccctgcccctgggccagggtggactccatccttggccacctgcttggggcagttgtacaggggctgccaggcgagtcaggcaggcacaaagcaacatctgtccacgggaaccgagggcaggcctcccctggaaataaatgccacatatggtgggagtgcggacttaaattttttttaactgggtggatccagtcaataaagggggagggaaggcggtgtgctgtctggggaagtctctgggcgtgtgatcgggagccagaattgacttcagaggaggtggtgtgatgtgatggtcagagagacctgggatttggttccagctctggttgttaattcttctgtattccttccgtgggggtggctagggtagagtgggtgagtatgctacttctctttctggggaggggtctgccaaacctaccttctccttatctgcctgggtgcattgaagacaagtgctttatgtattgaaacagaagaaaaaaagtggtatcaattgtaaaacaggcagctgtgaaaagtgtttcacagtttacaaagcactttcacatggttttctgaggtcctcaaaaaaagacagaaagcaagcaagcaaccagccatggaaagtagataaggttgttaggcttaagattatcacatttttaaagcagaggaaaccttaaaagagagaggtgaaaaggcttgagtcatagacatggggttctgcctgaatgtgctctttctgctgccccatgctgctttatactttgaagatcctgaatacattctttgctgaatgctaaagctgtgttagcttggggagggccctgtggatctttgtatgtgcggttgcttctttaatctttgggctggtgatagcttggcagagaggccttgctttcccttgccttggtaggagtttgtcctctgtggggccatacctttggcctgccttttcctcttccaaagtcctgctgagactttggaagcctaagacgtgtgaacgctttggatgattctgagagttcaagccaacctgccctgtggccttctcgtgactttgttaggactgaggcatcttctgcctgcctggataggactgaatacaaaagtagattttttttttcatcttttttttcagttagggaaacccagttgcttgggtggatccagacaaaatggattttcatccttggattttgtgcccacgcctctgggtcaccttgtgtcccttggcaacagctgctgctgttttggtcgtgggcagaaaactaaaggccacgtcttggggaggtggctggtttggccctgtgctggtgatatcaatgtgtctgctaagccccatagattgcagtgttgcttgtcaaattgtctgctttcaccacaactgccttttagtttggaaagtagagaaaggaaaatgtttaacttagtcattccccctgtgtgtggggggttggtcactgggtgcttaaaaacactctgcaagatctggactccggggtttaaggagccctcagtctaaggagattaagccaagtgtgttttggctaatatataatcatgagcagcaacagcaacatttggcaattagagctgtatactagggacttccagaccacaggcttgcttctctgtgacaccagctctgacttgtttcaattatcaggggagctggcgtgatacacacttatcgacataaagaaggtgaaagagattggtgccaaggaagtggtaagagcttcatttagatacaccaacaaaggggctgtcaggatactctgaggtctggcaggattggcagaatttacacaagttttataacagcctctcatgcctcacctgcttgagtacctgagtaaagctgcaggtatcttccttgccagtttataagaatggaatcaaagcatttgccactgaatgagagttggtgtgtgagcgttatatgaggaataaggagctcggcacacttaaaacttagttttctggtagacactggtagcttgtacttccaccagggaatccatgccttggcctcgttgttgggagctagaccaagcttaaagcattgcttgtttggaagggaatttgggctttcttgtgtcagagcacccagtccagtggaaaattggagaattgaagcaaacactaggtctgacacacagcatctactccctccctgtgaatctgatgtttttttttttggagacagagtcttgccttgttgcccaggctggagcgcagtggcatgatcttagctcactgcaacctctgcctcccggttcaagcgattcttgtgcctcagcctcccgagtagctgggattacaggcgcccgccaccacgcccagctaatttttgtatttttagtagagacggggtttcaccatgttggtcaggctggtgttgaactcctgaccttgtgatctgcccgccttggcctgccaaagtgctgggattacaggcgtgagccaccgcgcctcaccgaatctgatcttttactgtagcctcctcttattatctccttgacttttgccagggtactctcactttgagaaaggaaaaagatcctagtctttaacatgccttttccagatttctggggatagacctattactaaggctgtagaggcctcccttttctcttggctgcacttcagagcaccatgcccgtgtggcccattggaagcaagcccccttccagctgctagggaggtggtccattatctctttgctcttgttaagtttgattaggggagttccacgtagggcctgagaagaggaggtgcctgcaggacaataggtagctgatgagggatctgactcagctgcagctgaacctaggcgccacttgacgttccctgggaacatttagaaccttggaacatgctgcttgcacctgggagtggaatgtttgcagacagcccctctgttgttacagggctggattttgttgatttattgatatttattggaccctcccatgtctgagtcaattttttaggtaccagaggaggatgcagagacacgtttgagaagctcccagcctgtgagaagcttacacatcagtaagggaaacatgaatagggcattatttgagtatctaactgctatctctttctcattcccagctaccagcagaaatatgagatctagtatggatgatttttgatgggggcgggcgttgatgtgccttttaaatattgtagaattcggcccgctctgccagctgggagtcctcacggggacctttgttgtcttctcctgagatccctcccagcactctcagctagcagtgctctgatctcctggacctctggatctgggagaaatgaggggagagagagctttccaagtgtctgaaagtaggaggccggactctgcagaaagcaagcacaatccacatttccctctctttctgcccctccccgtcctggcaggtccctggatggccggttgcaggtgtcccatcggaaggggctccctcatgtcatctactgccgcctgtggcgatggccagacctgcacagccaccacgagctgcgggccatggagctgtgtgagttcgccttcaatatgaagaaggacgaggtctgcgtgaatccctaccactaccagagagtagagacaccaggtatgctgcctggcctgcctgtggggacagcaggtgccaggggtcatcacctctcccccgctccccatccccccgagggtctgcggtgcacttgggggtgcggggactttggtgctggtctggcatcgacactgagccacctctgctctgtctcccccggacagttctacctcctgtgttggtgccacgccacacagagatcccggccgagttccccccactggacgactacagccattccatccccgaaaacactaacttccccgcaggcatcgagccccagagcaatattccaggtaggcacgtgggcggcacaggctggcctgggaggcaggggcagcggtcagccccgacatcagtcctgtggccccaatctctgccccctggccgtcccccgctcaccccctctttgcgcacagctctggcctgagggcccctgactcagaaccgcatccctgttgggagaggacccatgacctcagctcccccctcactagtgatgcttttcttggcatagaggagcagcgtgacccttccgcccggccttggtgcagtcatttattttggaagcggaaatagcaacactgtttctctcaccgcccttgaggcccggactggtgttcagtcccaatagactgggggtctgcagaggcggggagtgagctgagggccaggcagcaagtgcggagagctggctctgtaaattcgcctgggcatcaggcctcggtgaggggctccaacctgggtgggaattgaagtgactttgagttttcactctgcagggagaaatgggctttgccgtcaaagactgcaaatgtttttagaagcccctcatttacatgcaaataacgtgtgaatcaccagcactttcagactccaggaaagctgtgcttggcagcacttgggctagtcacttttgcttgctggggcagtaatcctgctgcgttcctcttagagcattctaatttggacgtgacgttcatcctgggttagtttactgggctgagattggctacaggcctgtgtgcttgggtcagagtgtttaaggaggagacccactgtccaaccttctcagatcctttgcgggtagccagcctggcagaggctctaggagtacacatttcagacttgggagttgatccggtcctgcgtgagaaaggcagttatgatccaagcgggagtcagaggtggacaggggcgaggacaacagaaccaagagctggaacctctactccaagacctggagctcctacagccacggatgctagcatcatggtgtgcatgtgtgatgtctttgcaaaaggtgtctcagagccaagctgtgaaggccttttaacagaccaccttccttctgattcccagagaccccaccccctggctacctgagtgaagatggagaaaccagtgaccaccagatgaaccacagcatggacgcaggtcagtcatgcagggtcatgctcttattcttaactgattagcagctggtgggttcatcccttccatcccttcctcttcgccctctccctccctcccttctatctctctctccagtatttgtagagcaaccgcgatgtgcaaggggcagggcatagaagcagggccctgagctgggagtcttggttaggatcataaaactatctgagacctctgagatcataatcataagagacctctgagatcatccactcaatgcattcattccagacaagaaattggggcccagggagggaaagtagaggcaagggtatgggctaggccttctcctgggacccctcagtccagggttttctttctgctgtgttgggctacccctccttgatatgtaagtgtttagtaacttggctctccaggccaagaatcttttgtgaagtctcacaacttgtctcacctcgcaggttctccaaacctatccccgaatccgatgtccccagcacataataacttgggtgagtatctccttgtgcacacaactggaaccccctctagctgcagcccctggcgagtcgccagtgtggggagggggccctgaaggtaaggctctcccccgacccctaccatcagcccagctcagcccatcaggtttctggttacggtgatgttgaggtcaccacggaatggggaaacttgagaacagtggtggcaggaaagacaaccatatgccaggtttgtatttcccctggggggcgggtagacgtgagtgaatgaaaattcccccaaactttatgcccaggagaacgagggtctgtggtcagctaagcatacagagaatgggcctggagatgctgcagaggcgtgcagtaggagggcacagtgccagggccactgggccggggcaagaggagggcgaggaggccccaggaaatggaaggctgggatccatttctagtgtgaggagaagctgccatttactcttctgagaaagagaaccagccccttgtagaatggcagttttgctttgaggagcccctaatggagactgtacagacaactgggacaaatacagattttctttcagaagggtttgtgtccgagccaccccaacagccggcatctagataagtgtggaaaatagtttctgtgataggaggcatggccccaggctcagtctgcagatgatgcctggtgtgtccactgcgccaacatggggcgctgttgggaacccactcggctgctgcaggcttggaagctgctgctccacaggctgggagtttttgcccccaaggctgtgcagagccaaaatctgaaagcccttttaggggcagggattaatgtgggttactctggggaccttgcaacagaggctgagaggtgactgtgcaggaggtgtggcctgccccacagtgagtacacgcanncctgtcccaggttcatccaggtactgggtggcccctggtcctcttcaggtttggcccagcccctccttgaagactccttccatccagtcaaggccaagcaggcggggcagggcctttatgagctaaataaataaataaataaataaataaataaataaataaaaagagaaatcaatggccctttacacacaaggctgatggaatctcctccagacacctgagcatcttgttctggtggctcttgccagttttatacgataaaaggcatggggtagggagattataatccctctgaaatgcggggaaatggttttccagagtgtccatgggaccccatcgagggagcatggggcttgggacacccaatgacccagtagcccaccctgtgtccacagacctgcagccagttacctactgcgagccggccttctggtgctccatctcctactacgagctgaaccagcgcgtcggggagacattccacgcctcgcagccatccatgactgtggatggcttcaccgacccctccaattcggagcgcttctgcctagggctgctctccaatgtcaacaggaatgcagcagtggagctgacacggagacacatcggtatggggtggctccattccccgcccccccaccctgcccctgccactctatcccacccccagccccgcctcaagtgatcctcccaccttgccctcctaaagctctgggattattggtgtgagccaccgcgcctggcccccatccctatcgtagagacaaacgaagactcagagggtgaataacttgactgaggcccatgcctactcagtggcaaaggctgtcactgagacctatcctgtgtgcccatctcttgtcatctgcctcccttggctttaggaatccggcagtgcccatttcccctactttaggcttgggctttggggcccgtttgcctggggaagctggcagtcactgggagcagctctgctgttctgcctcctttgcgagcctcaggtggccccagggcattgtgtgtgagcaaaggcaccctgtccagtctaacctgaatctctgtaggaagaggcgtgcggctctactacatcggaggggaggtcttcgcagagtgcctcagtgacagcgctatttttgtccagtctcccaactgtaaccagcgctatggctggcacccggccaccgtctgcaagatcccaccaggtaaacgagccgcacaggcacctcctgccttgaggtccctctccgagtgcatgcctaggatgctggagagagtccacctttctcaccttttctgctcactcatgattgcgttgtcaatctggaggtgattggattaggttttctctatgcccacagatctaactgtgctttccctggacttccagggagcagatgtagcatctgataggtctgcctttaacctgtgggtacctgcctgttgccctgtgtgtagatgctcaggcagtatggcttcctttcttcactcattcattgcacaaacagcatgcagggctctgtgccaggtgctgtaggggatgaagaggtagatgcggccctgctctgcccccgcagacttactgagtgtggagtgtgtggcaaatgcatcacacaccatgtgtccctggagctgtataaatgaggctggtctagggggtccaggacttgctttatccaggaggggagcaacggacctggccacttccatccccacagccctgtttctgtgtttttggcaggatgcaacctgaagatcttcaacaaccaggagttcgctgccctcctggcccagtcggtcaaccagggctttgaggctgtctaccagttgacccgaatgtgcaccatccgcatgagcttcgtcaaaggctggggagcggagtacaggtcagttatgggtgctgcctacatcaggggacccaactccaggtgactctggacagcagagcaggcagggctcctcagagatgagctaggccagccctagcctgcctgcaagctgcgtcatcaactagcctgaatttagacaaagtgctttggggaaaagaaacgtgtggtgtgccttgtttttttccagtaattgttccatggctcgttctgcttgtaagattttccaaaataaggccgtagatgagaattatatcagcacattgggaaccgaaggcatgcggacactgttggcgctttgtaaaaaacacccctcaatcagacagacacacgtcatcgtcgcctgctggggctgggcccagatttcgagataggggagcggcacgtgcccgtgtggtacagatgggagccaggaagccctttgctcaggatggaggtctcctctattagggggcctgttacagtaactggtgggcctctggggtaccctgcaattgactttacatatttaactctttgccattgactttacatgtttaactctttaaagtcgacttccttccccctcaagagaacttaatttactcaaagtcctccctgggtagaggagtttggccgggtagtttcagcaagttactggtaccgcttctaggacagcgtctaacagcatctttgggaagatgactgtcaccaaagcagaaaaagctttctgacttgtgtaaccccctggagattttttaagtcccccaccccacccctttccctatttcttacaggagacagactgtgaccagtaccccctgctggattgagctgcacctgaatgggcctttgcagtggcttgacaaggtcctcacccagatgggctccccaagcatccgctgttccagtgtgtcttagagacatcaagtatggtaggggagggcaggcttggggaaaatggccatgcaggaggtggagaaaattggaactctactcaacccattgttgtcaaggaagaagaaatctttctccctcaactgaaggggtgcacccacctgttttctgaaacacacgagcaaacccagaggtggatgttatgaacagctgtgtctgccaaacacatttaccctttggccccactttgaagggcaagaaatggcgtctgctctggtggcttaagtgagcagaacaggtagtattacaccaccggccccctccccccagactctttttttgagtgacagctttctgggatgtcacagtccaaccagaaacacccctctgtctaggactgcagtgtggagttcaccttggaagggcgttctaggtaggaagagcccgcagggccatgcagacctcatgcccagctctctgacgcttgtgacagtgcctcttccagtgaacattcccagcccagccccgccccgccccgccccaccactccagcagaccttgccccttgtgagctggatagacttgggatggggagggagggagttttgtctgtctccctcccctctcagaacatactgattgggaggtgcgtgttcagcagaacctgcacacaggacagcgggaaaaatcgatgagcgccacctctttaaaaactcacttacgtttgtcctttttcactttgaaaagttggaaggatctgctgaggcccagtgcatatgcaatgtatagtgtctattatcacattaatctcaaagagattcgaatgacggtaagtgttctcatgaagcaggaggcccttgtcgtgggatggcatttggtctcaggcagcaccacactgggtgcgtctccagtcatctgtaagagcttgctccagattctgatgcatacggctatattggtttatgtagtcagttgcattcattaaatcaactttatcatatgctcttttaaatgtttggtttatatattttctttaaaaatcctgggctggcacattgactgggaaacctgagtgagacccagcaactgcttctctcccttctctctcctgaggtgaagcttttccaggttttgttgaagagatacctgccagcacttctgcaagctgaaatttacagaagcaaattcaccagaagggaaacatctcaggccaacataggcaaatgaaaagggctattaaaatatttttacacctttgaaaattgcaggcttggtacaaagaggtctgtcatcttccccctgggatataagatgatctagctcccggtagaggatcaccggtgacaact

SEQ ID NO: 3 - DNA, 1862 bp, Artificial Sequence
  Description of Artificial Sequence:/note = synthetic construct
atgtcgtccatcctgcctttcactcccccgatcgtgaagcgcctgctgggctggaagaagggcgagcagaacgggcaggaggagaaatggtgcgagaaggcggtcaagagcctggtcaagaaactcaagaagacggggcagctggacgagctggagaaggccatcaccacgcagaacgtcaacaccaagtgcatcaccatccccaggtgggggcccgcccgggggggacccggggtctctcttcctgcccctccccgtcctggcaggtccctggatggccggttgcaggtgtcccatcggaaggggctccctcatgtcatctactgccgcctgtggcgatggccagacctgcacagccaccacgagctacgggccatggagctgtgtgagttcgccttcaatatgaagaaggacgaggtctgcgtgaatccctaccactaccagagagtagagacaccaggtatgctgcctggcctgcctgtggggacagcaggtgccaggggtcatcacctctccccggctccccatccccccgagggtctgcggtgcacttgggggtgcggggactttggtgctggtctggcatcgacactgagccacctctgctctgtctcccccggacagttctacctcctgtgttggtgccacgccacacagagatcccggccgagttccccccactggacgactacagccattccatccccgaaaacactaacttccccgcaggcatcgagccccagagcaatattccagaggtaggcacgtgggcggcacaggctggcctgtaacagaccaccttccttctgattccagagaccccaccccctggctacctgagtgaagatggagaaaccagtgaccaccagatgaaccacagcatggacgcaggtcagtcatgcagggtcatgctcttattcttgaagtctcacaacttgtctcacctcgcaggttctccaaacctatccccgaatccgatgtccccagcacataataacttggtgagtatctccttgtgcacacaactggaaatgacccagtagcccaccctgtgtccacaggacctgcagccagttacctactgcgagccggccttctggtgctccatctcctactacgagctgaaccagcgcgtcggggagacattccacgcctcgcagccatccatgactgtggatggcttcaccgacccctccaattcggagcgcttctgcctagggctgctctccaatgtcaacaggaatgcagcagtggagctgacacggagacacatcggtatggggtggctccattccccgcccccccccctgtccagtctaacctgaatctctgtaggaagaggcgtgcggctctactacatcggaggggaggtcttcgcagagtgcctcagtgacagcgctatttttgtccagtctcccaactgtaaccagcgctatggctggcacccggccaccgtctgcaagatcccaccaggtaaacgagccgcacaggcacccctgccttcccacagccctgtttctgtgtttttggcaggatgcaacctgaagatcttcaacaaccaggagttcgctgccctcctggcccagtcggtcaaccagggctttgaggctgtctaccagttgacccgaatgtgcaccatccgcatgagcttcgtcaaaggctggggagcggagtacaggtcagttatgggtgctgcctacatcaggggccaccccacccctttccctatttcttacaggagacagactgtgaccagtaccccctgctggattgagctgcacctgaatgggcctttgcagtggcttgacaaggtcctcacccagatgggctccccaagcatccgctgttccagtgtgtcttag

SEQ ID NO: 4 - DNA, 1845 bp, Artificial Sequence
  Description of Artificial Sequence:/note = synthetic construct
atgaataccttccaagaccagagtggcagctccagtaatagagaaccccttttgaggtgtagtgatgcacggagggacttggagcttgctattggtggagttctccgggctgaacagcaaattaaagataacttgcgagaggtcaaagctcagattcacagttgcataagccgtcacctggaatgtcttagaagccgtgaggtatggctgtatgaacaggtggaccttatttatcagcttaaagaggagacacttcaacagcaggctcagcagctctactcgttattgggccagttcaattgtcttactcatcaactggagtgtacccaaaacaaagatctagccaatcaagtctctgtgtgcctggagagactgggcagtttgacccttaagcctgaagattcaactgtcctgctctttgaagctgacacaattactctgcgccagaccatcaccacatttgggtctctcaaaaccattcaaattcctgagcacttgatggctcatgctagttcagcaaatattgggcccttcctggagaagagaggctgtatctccatgccagagcagaagtcagcatccggtattgtagctgtccctttcagcgaatggctccttggaagcaaacctgccagtggttatcaagctccttacatacccagcaccgacccccaggactggcttacccaaaagcagaccttggagaacagtcagacttcttccagagcctgcaatttcttcaataatgtcgggggaaacctaaagggcttagaaaactggctcctcaagagtgaaaaatcaagttatcaaaagtgtaacagccattccactactagttctttctccattgaaatggaaaaggttggagatcaagagcttcctgatcaagatgagatggacctatcagattggctagtgactccccaggaatcccataagctgcggaagcctgagaatggcagtcgtgaaaccagtgagaagtttaagctcttattccagtcctataatgtgaatgattggcttgtcaagactgactcctgtaccaactgtcagggaaaccagcccaaaggtgtggagattgaaaacctgggcaatctgaagtgcctgaatgaccacttggaggccaagaaaccattgtccacccccagcatggttacagaggattggcttgtccagaaccatcaggacccatgtaaggtagaggaggtgtgcagagccaatgagccctgcacaagctttgcagagtgtgtgtgtgatgagaattgtgagaaggaggctctgtataagtggcttctgaagaaagaaggaaaggataaaaatgggatgcctgtggaacccaaacctgagcctgagaagcataaagattccctgaatatgtggctctgtcctagaaaagaagtaatagaacaaactaaagcaccaaaggcaatgactccttctagaattgctgattccttccaagtcataaagaacagccccttgtcggagtggcttatcaggcccccatacaaagaaggaagtcccaaggaagtgcctggtactgaagacagagctggcaaacagaagtttaaaagccccatgaatacttcctggtgttcctttaacacagctgactgggtcctgccaggaaagaagatgggcaacctcagccagttatcttctggagaagacaagtggctgcttcgaaagaaggcccaggaagtattacttaattcacctctacaggaggaacataacttccccccagaccattatggcctccctgcagtttgtgatctctttgcctgtatgcagcttaaagttgataaagagaagtggttatatcgaactcctctacagatgtga

SEQ ID NO: 5 - DNA, 160820 bp, Artificial Sequence
  Description of Artificial Sequence:/note = synthetic construct
aagctttgaaactccacaaatgaaaacactcagcccttctcttcagagagttcactatctctggtggaaaggcagacactgtggaagggtagtacagtgataaatcatgtggggattcctaaacagtaatgacagggagagatttgctcagagtgagagatttgatcctgggattcagagcaggaaataaagaggatcctgaagggagcccatagaattggaagaaaatgaagcagtcaaagagctagagatccctctgaaggatgacgaagtgagggcatcatatggctacccaaaatggtagaggattgtgatccaagagtggataagggcattcaccattgctgagctataatgatcctaggtgagtgctgcccatcactgaggcacacagaagactgactaaagtgaaataaggattgaaagtggtaacattgaggagatccatgacttgtagagcttccctctatcacatgcctcataggtcatctgttctttccttaacattacttccatctcacaaagccatccattccattttagcagcccagtttgtttacttccctatactgcagagaagtcttcttccctttaatttctatctgttgataccatttcttccactattagctatgtagaaaataaaattgaagggatcacgtctcctcatttattcaccaaatatttgcacaccagttatatgccacatattgctattaatagttcctggaactatagaagtatatgaggtgatcatttctaacttatggtattgtctagactggaggaagccagaaagtcaaggagtggagtgagagttaacagagggaagtaggctatcatgggacctgaaaacaggaaagtctaaagcgtgtatgtatacatgataggggaggggagtggacagaaaagggcccccagagagcacgccacctgagctgcatttggagcgcacatgtataggactatacctggagagagtgcaggcaaatggtgcatcaaacgcagcaagtccaggttgagttgtgatgcatttgaggagctgaagtaagtcaacatgaagaagatgaggctgaaaagtaggcagaggttttgttaactattttaggagcttgagccttattttacgatgatttatttggaagcgacttaaggagaacagaaatgatcacagttaggtttttaagagaagaatgaattggagcgtaggaggaaattgtatttataaagactggtaagaaggcttttgaggtaaatcagctgagaaatgatggtagcttgtactgtgcaagggtggagggagctaatggatatatttgaaagctacttagcaggtagactctgtaggacttggtgatttataggattggtgttggggagggtaggagaggaataaatcaagaatggaatctgggtttcgcatttggtcacgtgatagcagaagaaacaaggtcaggggaaagataagtctgctttagacatatttaattcaagatgattactgactttcaagctttcaagctgatatttccctgttctctaaatttaaaaacaagttatttatatatttattgacatcaattgacaattgccttttttgtgctgcttctgcactctgtgtagaccttataatacttctaacgctcctgggttataaactccttgaaaatagaggtaacttcttatatccctggagaatagtgccaggcatatagtgttaagcaaatgtttgaattaatgccactttattttgcttccttgtttatatgtcagtctccttgaagactgattctttaagcgtaaggacctcatggtgatctttgcatttccagtgccttctacagagcctgacccacagttagggttcagtaaacattgtttctattgttatttcatcgtcatcatcatctactatttaagtaccctcatatttttgttaatttttagtcctgggtgttaaatagtaataatctaaggttttgggttttttttagaatgtgatgtgagaatggggctcaatttcaattttagacatttaggtttaactttcataagccaagacttttaatgtaatgcaggctgacttagacattatttactgtgcttcatttcagatatatctacataatgggaatacaagaaagaaatgagaaattgttttatagaatactgcaagatgacattgagagtttaatgccaattgtatatacaccgacggttggtcttgcctgctcccagtatggacacatctttagaagacctaagtaaggcttgtttaaaaaaaagcttgtaaatgattattgaataaggaaaatatcattccataacacccattacatttctattttatgtttgttagccaaatcacatttcccacctcagaaaaacgtaattttgattaaaagagattaacaaaatcccaacatattcataacttttatctttgtaaaaatagcataattcatttctaatcttctttaaattattgtgattgttagaggaattacatacatacttctggaacctgctcccccaccaaaaaaagtcttaattctggtgggagattatccagaattatcattaaaatttttgtcaataaagtcaaattaagagatttttttttctcattttttaatcagttttaatttgtttttgtttttgagacagagtctcactttgtcacccaggctggagtggagtgcagcagtatgatcttggctcactgcaacctctgcctcccaggttcaagttattcttgtgcctcaacctccctagtagctggaattacaggtgcacgccaccatgcctgctaatttttgtatttttagtagagatgggatttcaccatgttggctgggctggtcttgaactcctgactccaagtgatcagcctgcctcagcctcccaaagtgctgggatttacaggcgtgagccactgcatctggcctgttctcctttttttaatgaattttcattccaaatagttgtagcacctacaaacattataagtgggaagagtactgaaatggcaaggactgactcaagttcttgaatgagtcgcgtgatccccatgaatgtgtttcctcatgtgtaaaatgggaatagcaggacctatcaaagagctattggagaaaccaatgtgacagttctttggaaaattatcagcaatattatatacacacacacacacacacacacacacacacacacacacacacatatgctgttttcacttaatctgagttttcttattcctctaatccattattatttttctcaatccttataatattttccccatgcccaattaacacattcttccacgtgtagaaattcagtctcctgtcgccttgtctagtggctttcaaactttaatgtgtgtaagaaatacctgtgggacttactcaaaatgttgatctctgccaactttcctctcctccccatccccaagatttctgatgaaaaagaaaaaaggtctggaggtccggattttagtgagcaccctcagtgattgtgttgcaggtgttccctggaagacactgagaaacagactgttctaacctagatgctgccaacaattactgtaactaaaacatttctgtgacataaccatgctgttcagctattttatagtttcttattagaatgattaaaagatagagagaaacttagaaatactgatgcctgagccccacccccagagattcagattcagttagtctagacttaggagtttcacaaaagagcctggtgtaattctgatgtatacccagagttgagaactgacttgaaacatgaagagcatggcttatgtgtgagggcaaatactgtatattgtttatgcaatgcattgtgctatgggttttttttgttgttcattttgtttttgtagatggtcattaaatcttgattggttggttgattgatctaaactttaagctaattaaatcagaatctttggaggtgggaccctggcattttaaagcttatcagatgattccattatatagccagattgagaaattgctgaactaaactgatttgaactgtaatagtagtgccaaatttaagataccaatgagaaagttaaacctaagatcagtttgacagcaatgaggatccactggccctcatgtctgcctgacctgtgttctagaacctgcgtttcttctttttttcctccttctctcccttccttctttgctttctcttttgaaatctggattgattatctgaattaggtaacaatatactgtgtctaaaatgactttttgttagccattccacaatttatacatacttcaaaacatgttgtacatgataaatacagttgacccttgaacaacacaggtgtgaaggtccatttatactcagattttcctgtgcttctgccacccctgagacaggaagaccaacccctcctcctcctcctcctcctcctcctctttatgattttgttaataacattttcttttttctagattactttattgtaagaatacagtatagaattcatatggcatacaaaatagtgttagtcagccaggcacagtgactcatacctttaatcctaacactttgggaggctgaagcgggtggatcacttgaggtcaggagttcgagaccagcctggccaacatggcgaaaccctatctctactaaaaatacaaaaactagccaggcatggtggcgggcatgtaaaatcccatctactctggaggctgaggcaggagaattgcttgaaccctcggtggaggggcagaggttgcagcgagccgagatcgtaccacttcactgcagcatgggtgaaagagcaaaactccaagtcaaaaaagaaaaaaaattgttagtcaatctgtgtgttactggtaaggcttctggtcagtaataggccattagtagttaagtttttggaaaatcatatgtaaatttttgatttgattttctaacacccacattgttcaagggtcaactgtatatccaatttttgccaattaaaaaataatattaaataagtaaaagtaacttcactttttcctgatgcttcaggtgtctcatcttttgtgtgattttactgtaattttcttctctcccttcctgctccctcaaatttcaaattttcagtttcagtaagtcttaacaatagtttagttggccttgtactgctctcctgcattggtggcttgctttagattttttttttttttcctggtggtgtattgagtttatttgaacatgagatgtggttacatttcttcttgggtaaaatgactgtatcatttaacaataatctttgttgcatctgctatgaacagtaattacagtttgaagtacttgaaaatgtttgaaaataaaccagtgtgacttagctaaatctgcttggaaattataccatgtcttgatattttattaaaatatcaaaatatttcaattatgaacaaaaacttagaaacaaagctgttgtgaaatgcaaaggtgtttttgttctgttgcaggggattatttatttcgatctcagacagaggtcatgttagatcaattgtggataactggccagaaaatcatgttaaggtactaatagcacaaccctccttttcacaatgttttctcttttcttgtaaattacctctaaatctccaagaacagtttttcattgttgctctcatttattttgcacttatatacatgcagatttagtgctttgcagctgaagtgatgataatagtagtagttataaaatgggctactggtataaagtttgactctgagaaagaaattagagctagaatacaaggtgagccctctcggtatcagcaccactggtgtctcctgccttctcaatctccttttctatttcactaatattattctaggtaaagaaaatacattaaaatgccataaaaacttttgtttatgaatggtgttagagaagtttggttatgcctttttttcttttaaatctaagatttagaaccttagcaaatataaaaatgttaaatatagcaaatataagccctggcctatttagttatctttcataaaataaaatgtaataacttatttcaagatctttgggtaggcttttgtaaattttattgtaggcaataatcttacctgcctttatactcctttccaaaataaacattgaatgatcgttggtttgaatactctagcaaaaatttggtcaaataattaaactcacagtatcatcttaagaccttccttataagtaggtattttttttgttctagacctttttctttttcacagttgctaaggttttttttgtttggcctaggttattgtgttggagtaccatgctgtttatttctaaactcttatttttctcttatggtaatctctccatcagaatcttgttcatctctgccatatttaatctttctgaagatatttaagttggtcctctagtcagaagaattctattcctaaaccgaagtcagagggaaatcaaatctagttaatgtctcataatactcagaagtcctagaattttaagtatgctttgttggtttacattggaaattagccaagaaacaattttatttttaagagcaaagagtaaatatatatgaagtgaatcaatcttttaaaaaatgcttttctttagtgccccatttttgacaacttttaatttgcatttttttgtgattaaggctgttgtagtgactgatggagagagaattctgggtcttggagatctgggtgtctatggaatgggaattccagtaggaaaactttgtttgtatacagcttgtgcaggaatacggcctgatagatgcctgccagtgtgtattgatgtgggaactgataatatcgtgagtaacatcattttccccctttatcttcctcctgtattttttaaaatgtgtacaatattccttttttgaaaatgataatttaagaagggaaagttttatgattagatttttttttcttaaactccacttttaatatttatataaataatagtaaattaagtctattaaaagtttcttggtccgggcatggtggctcatacctgtaatcccaggacattggaaggccgaggcaggcagatcaccaaaagtcaggagttcgagaccagcctggccaacatggtgaaacccagactctactaaaaatacaaaaaaaattagctgggcgtggtggcacatgcttgtaatcccagctacaaggctgaggcaagagaattgcttgaatgcaaaagacagaggttgcagtgagccgagatcacaccattgcactctagcctgggtgacaagagtgagactgtctcaaaaaagaaaaaataaagtttcttgtagggcaatacatttaaaaaattgtattagtaattttttattttgcaatttttattgtatgtgtttaaactgattatataaattattttatttttacatttggtttattttgtaggcactcttaaaagacccattttacatgggcttgtaccagaaacgagatcgcacacaacagtatgatgacctgattgatgagtttatgaaagctattactgacaggtattttttaaaagtttgagtatatgaaagcacctttaatggggtgggtggggtaagaaccaaagttttgttttgttttcctttatttctttcctgtgtagataagcaggaggcgattaaatttttgagaactttgttctgcctggctgtttctgcctgattagatgtgccgatatgaggtggtacccatggtctgccttgctttcttgagttacctgacattttgagggaagtctgccctcactgcttccatcaaacgcttactgctcagtacctttttcagccttgaccttcaggctcacgcccaccattccactgaagctcttgtgcagcttttgtattttaagttctctgaccattgggtcctcccacttctctacctctttgcaccgtcaactcaggttttcccacttctatgtccttgaaactctctcttctcttgactgctaaacagcttcctcctaacttggtctttctcccacctttctcttttttttttttttttgtcatcttcacaggttcttgctgtctcttactaaatgtggataactacctagtcctcttctctttcagccatgtcaactatgacctttatgcatgttactactaaacccataaaaacccatctgtagttccactgctcttgtgaggcctgcatttctaatagtcagaatcttccatctggatattctgttatgagtgcatattcatatcccacactgaactcctttcctttccaaacaacctatcttctgtattcccagcttctattattggcagtaacattcatcctgttgccaaaactttgatcttagtgttatctttgactcttctgccttctccgtcagtctcccgtgcagtcagatattcctcaaattcagtgggtactaccacttaaatgtctcctgttttccattgccgcaatcttgctctctccttatctctcttctggagttttctaattcttcctccagtttctctcctctccagttcgtctccaccttaataccagattaattgttttgaaacgtgtgcttcattatgtcattcttttgcttgaaatctctgattggtttcctattgccataggataaagtcaaactcttttaccttaatgatctaaccctggcctacctttaaaattgctggcacgtagaagatatttaaacattaattccttttcagagtcaaagtcaacaagtctaaagctgaactttacatcttcccagaaattgccatctctccttcttcctctcactttcctatcttggacaaccaaatagtaccttcttagttaccccattaccttcacattgtaacagcttcttcctcatttcccagttgatccttatcaatttctattcatcctaatagttcatagttactccttttgcttcctgcatcttctgcttcagatctcttgtcttcgtatcatagtagcctcctagttgcttctgccactcccgtctccccacaccaatatgagctacgtatcactggcaggtttatccttcctaaagggagtcatatgtgaatattttcctttctctgcagccttcactgtttctacatgggatgcagaagaaagtccctcttctctaatttagcattcgagatcctcccttatttggttccaacctgcattaaccaatttctcccttatctcttaatgtaaaccatgaaatatatagccagactgttgaaaattcagggtcaccctaataacagcctgcttttcttcctagctctttactttttgttctttcagggcccacctccttttcaagccttcccttactacttgagctcacctagacgattaacatcttctttttctgaatgtcagtgaactcaaatagcaattatttttcaatttcttatttaatatatactttcttgtgttgctgtttaactattaatgtaatgagaatatacatatcaaatatatattttttgaggttcagagtcaaaggaagtgtcctcctggacacttgaaaatagtttacatagattgatatcccatgggtttatcattgtgccacattctttttaaacacctcatactttttttattgaataatttctacattttggatctagtctttcacaggctctgaaatttttcagatggccttaattgaactaacataatacattatttttgaatgctatcatagggaatattaggtggaaagctgtttaatagtgttattttcaacacaactattgtgggttttgctgtttttagatatggccggaacacactcattcagttcgaagactttggaaatcataatgcattcaggttcttgagaaagtaccgagaaaaatattgtactttcaatgatgatattcaaggtaaagcaaaaaaactttagggttttgattcctactttttaaacatttttaatgtgcccattttttatttgtaaaaatctttgtttttcttacagggacagctgcagtagctctagcaggtcttcttgcagcacaaaaagttattagtaaaccaatctccgaacacaaaatcttattccttggagcaggagaggtaagttttgaaggctttttgaaacttaagcctatcctctcttatagaattagaaaatgggcagaatattgatgtttatgaaagagcatagtgagcctgtaattttgttgaggtagaggatatgaaatcaagagttctgctgtaaaacatgtaatttaaaatatgtttcgagagaatatcacgaagaatttttgtttgatttgtaagggaaaaataaaccaaatatttcttatggcatataatcttcatatataaagtaattcaagcattgcatcgtactctagtatatattaaaatttatgttttgttgaacaggctgctcttggaattgcaaatcttatagttatgtctatggtagaaaatggcctgtcagaacaagaggcacaaaagaaaatctggatgtttgacaagtatggtttattagttaaggtaaggtatttaaaatttggagaagcaaaagagtgtattatatttttagttggatttttaaaatattattccttaaaatcttgtttctcattggagtctccaaattataccaattgggaccttccactctcttttcaacagatgtccctagtcttgttgtcttttacaaagacttctgcttcatattgaattaataatctctatgttggcatcagacttactctttcttgctttgttgtcttgctcttaagagatcaaatggccattgtacaagtatgatcgtgtttgacactcctaaaactaggtttttagtaggaactgagaacttcctaattaaattgcagtattgcagtagttttgatatttgagcagaaattcttttaattttattattatttattttttttgagatgaagtctctctctgtcacccaggctggagtgcagtggtgcgatgtcacctcgctgcaacttctgcctcctgggttcaagcaattctcctgcctgagcctcccgaggctaccgtgcctggccgtgagcagaaattcttaaccctttggagatcataatcccctgaagaaatctaataaaaatctgtggaccctatccccaggaaaaaagcatgtgctcctgaaaccaatttatggataataaagagcttatctcccagattaacttagtacctttgggcctgactacctttgttagcattgattaccattttcactagcttaagaatgtcatatatcttctgtgtaacacattgaatataagtaaactgttccatagttaaaccaatccagtacacaatgctgttatatttttgtatgtacacattaaaatataatggtatagctgtcgcttggcatttatgtctgtggagcaagctatctaaatgtactttgttccagttctaaaatcttttcttgttaattagaaccagtattctattagtacaaaaaataaaatgaaaagttaaagtatgtgaatgaaaaatcttgagtgctcaaactacatgtaatttaaaatgtaatagtagttatataccagacattgttataagactttacatgtattatctcctttaatcatctcaaaaaatcctgtgaagttttacaaatgaagaaacagtttaaaaggtcgagggagttttccaaagtcatcagcttataagtgacggaggtaggattcaaaaccaagtatcctgactgcgaagcctgtgctctgaataattaaactgtgctgcctcccaaagaggctgtaactaccatatttactagtatgtaaggcacaaggataaaacatcacatatttagaaggctattgggggatgtatgttttgactagtacacagttagtttggtacttctttttgtaatgttggttttcatcaaatatgttgtgattctttagcatattggtaggtcaggtctaacacagtattggtagctacaatgtgtttacttagcacaaagtgagaaccctgtccatctccatattcatcatcagattatatatttcttttccagtgtgcaggtagcttggcctatgggcattaggcttccagtgtctcctggtgatcctaaacactgcccttcattttgaaactttgaaaacagtggcttcttatgtcactgtttgctcagcctggttttctcagccgattgatgatagtgtcctgctttactaacccctgcagtttcttatctggagttatcttggagttctgatggaaatacactttttcagaagtcttcttttttaccaaaataagaatatgagttctcagttggtttttgcattcagtatgtttttgtctgccttaaatctttgagaaattcttcattgttctagtctgtcagtggtatctcttctggctttgtggcattactacaaatttaacttttatggtttttgacctgggatttggaaaggaaagcatgtttcttcattcagccatctttaaccagaattccctgttcctcttgtttctgaactcttggtagtgcaagtccatggtgtctgtctgcaattctgaaatcctaaaggctttgaaattccaaaattttttccaaaatttatttttgtgaccaatctgattgccttgaatttacctagaagcgaaacctgactcaaactaataagaagctctttgtaatcttaaccttttgtacttgatgtgactattcataagtttgttcagttgtggagtatctgttgggagggagaatatgtaatatttgatatacgccatattgtatttctaaaatatgaaaaattctcagccaggagtggtggctcatgcatgtggtggctcagcttcccactttgggaagctgaggtggacggatcacttgagcccaggagtttgagaccagcctgggcaagatggcaaaaccccatctctacaaaaaaatcatccgggcatggtggtgtgtgcccatagttccagctactctggaggctgaggtgggaggatcacctgagcctggggaggtagaggctgccactgcactcaagtctgggcgacagagtgataccccatttcaaaataaataaatcaaattaaattaaatatgaaaatttcttaattccaaaactcatctaccccagataaaggactgtaggcttttgtgccacattggacttaggaagacctcatagtgtaaatgcatttttgagaggaactagaaagtttctaggaataatggtagatttgatttttgttttatatttgagtttatggacatgatgaagatagagttggaaggtatgggttgaagaggaaagtaaatgaaaatgaaaagacatttctattgtagaaacaatgtgtaactcataatgatgtctttttatttcatctttaatatgcattgactaaaaaaatactgtattttatctcaaaatttagggacggaaagcaaaaatagatagttatcaggaaccatttactcactcagccccagagagcatacctgatacttttgaagatgcagtgaatatactgaagccttcaactataattggtaggtaaagtttttctgataaataattttactccctaactgtatgttgccagtcatcattaccatgtaggattactaaaaatgaattggcagttttacctagctttcagcatgtacaatgttttctgtgataactttttggttaccatgcatgaaattcagttaccagatgttgctttatacttttaggtcctagacactgtgtagtcgatcatgatttgcttttagagttggtatgactgttggactcaaaacatgaaaaaaaccaaagccatttgcagattttaccaggaaaattctatgcagactcaaagttttcgtggacaacaaagctgaaaactttgagtgtgttttgaatcaggcattgcatagatgccatcagactatgtcatcatggcattacattctcagcagaaaatgtaaaagtgtttaaaagaggagctatttaatttgctgtatagctgtaagtttttttgttttcttgttttttgtttttttttttgagacagagtctcactctgtcactcaagctggagttggctcactgcaacttccacctcccgggttcaagcaattctcttgccccagcctcccaagtagctgggattacaggtacccaccaccacgcccagctaatttttgtaattttagtagagatggggtttcaccatgttgaccaggctggtcttgaactcctgacctcaggtgatccacctgcctcggcgggtgagactccatctcaaaaaataaataaataaaaataaacaaccccccattttccccactccccaccccctaacaaccaccattctactttttgtctctatgaatttaactacctcatataaatggaatgacatggtatttttctctttgtgactggctaattttatttagcataatgtcaagtttcatccatgtggtagcaagttttatcttcccaattagagtgatgaagatagtcatatactctttttaaaaattggttgggcatggtggctcacacctgtaattccagcactctgggaggccaaggcaggcggatcacctgaggtcaggagtttgagactagcctggccaacatggcaaaaccccatctctactaaaaatacaaaaattagccgggcgtggtggcacacacctttaatcccagctacctgggaaggtgaggcacgagaatcacttgaacccaggagggagaggttgcagtgagctgagattgtgccactacactccagtctgggcgacagagcgagactctgtctcaaaaaacaaaaagttaaaagaataaaatttcccataatttactatgtgtatagtagacaataaatatttaagtgagaactttcagcatcttactgttttttcttttcagatttgagattgtgttctcatagattttgcattgctgagatagtgctatctttgtaatgagatattacctgtgtttttattattgtaggcctattgtagaaatgctattgataagcattgcttttatacctataatgaagttgctgtttttcccccttacttattacaggagttgcaggtgctggccgtcttttcactcctgatgtaatcagagccatggcctctatcaatgaaaggcctgtaatatttgcattaagtaatcctacagcacaggcagagtgcacggctgaagaagcatatacacttacagaggtattaataatcacatgaattgatatgtatattattttccctccactagcttattagttatacattcttacaccattgttctaatggtttccctagagattacagcatgcatctatgggtgatcaaagtctgatattaattattgcttataccaattatgggaaacaggtactttataactccactgtaatgccctcacactgtttgcactattgttgtgaattttaattttctatgtattttaaactcaaaatacattattgttatattttacaaaaattattcagatttacctacactttaatttatttatcactattcttcctgcaagtgcttctacctaggatcattttccttctaccagaagaattcctttatttaagtgtaggtctaatgaattctcttggtaatttattttgccttcattttgaaggatattttcactctgcatagacgtaaaagttggtaaatacttgagcattttgaagatatcattttactgttttctgacttttgttttctttttgatgatatagcattgtcttaggtttttaacagtttgactatggcggacatatgcgtggttttctttgtatttattccacatggggattatactgctcctgaatctatggcttgatgtctgtttttggtttttgttttttctgttttgaaaaaatatcagccagtatctctactttggccacattgtctctctcatcttatgggactctaattatatggttagagatatatctcatttatcttttacactgttttctatatttactatctctcttgctttctgtgtttcaatctggtgatttcctttggccctattttccagtttgcagattctctgttcagctgtgctcatctgttgttaggttcttaattttagttgctgtattttttcatttgtagaatttgtgttttatctgtatagtaatttattaatttagtaacagacttaaaatcatgtactgtagaaataatcaatctctaaatactgctttcttgtactcacatttcatgaaactttttactctcttcaaatgcatcttcaccatcagtgtttgtcttttctaaggctgttttttttgagtcatctggcgctgtggagaacaaatttttatttacatccgaactgtttaagattcactacttttagatctttgacactaccacgggattatagcccaattacaaatatctgcctataaatcacttgacatttgggtttttttcctaccattctgtaaggatgtagttgtaatctccacaattactttctatattgttgtggtaagtgatctaagtggctctaggaagtgatttttaaaggcttgtttacaatgatgtctagcagctataattgctagactacatccttgagagtaagtaataaatctgatacatttttttaatcttcactcctttaaaacaacgttttttatagtagaaaagtattacagtgtatctctcaaaagctaaggattcttttaaaaatataaccacagggccgggcacggtggctcacgcctgtaatcccagcactttgggaggctgaggtgggcagatcacgaggtcaggagatcgagaccatcctggctaacatagtgaaaccccgtctctactaaaaatacaaaaaaaattagccagatgtggtggcgggtgcctttagtcccagctgctggggaggctgaggcaggagaatggtgtgaacccacgaggcggagcttgcattgagccgagatcgcaccactgcactccagcctgggtgacagagcaagactccatctcaaaaaaaaccccaaaaaaccatatatatatatatatatatatatatatatatatatatacacaccacagtactgttatacctcataatttgaacaataattatatcttgtcatttaattttttttttttttttttttgagacagggtctctcttggttgcccaggctggagtgtagtggcacagtcatagctcactgcagactccaattcctggctcaagtaatcctcttgcctcagcttcctcagtagctgggactacaggcaaataccaccacacccagctaattttttaatttttatttttgtagagacaaggtcttgctttgttggccaggctggtctcaaattgctgacctcaagtgatcccctgcctcagcctcccaaagtgctgggattacagacatgagccactgtgccccacctaatttcttgaatatgtgaattgcaattaaaattttctgatggtaacaaatatctcactcatttttattatctatcttttgttctgtcttggttatcaggtttgtttgtaaggctaatttgtccttttttttttctttttttttttgagatgaagcgtcactgtgttgcccaggctagagtgcagtggcgtcatctcacctcactgcaaactctgcctcccaggttcacatcattctcctgcctcagcctcccgagtagctgggtgcccgccaccatgcccggctaatttttttgtatttttagtagagatggggttttaccatgttagccaggatggtctcgatttcctgaccttgtgatccgcccgcctcggcctcccaaagtgctgggattacaggcatgagccactgcgcccggactgtttttgtttttcttaattgagtgatggatagtgtagaaaaagaactatagcaataatttaaggctgtggataaagttatttttggagaaagggactttactttttcaagtagatcgccataatccagtcaggatgtggtccacatgaggcctggggtatttccagtttgccctttctcctgatatccacccctttgggtatgaatcatcaaaagtcctgaggtatttatcagcacctctcatccttaacggtccctgaacatccattttcctctctgtcatcatgagactttgggtggctttgctgttcagggtctcagtcacagcttttgatttggaaatcagcagtcatcttgaggggaagagcttcaaatgctaggctcatatatcttgcttccctcttcttttgaatcttggaaacctctcttccccaacaccaaactctcactatcttgttaggtctctgcttgcttacaaaaatttttaaaaatgtattttatctggttttttaaattgtaaccagaggaaaatttggtatgaaacaacccagaaaatcattgccaaagcagaactctcagaacttcctgaacttaatattcatacttttgatatatttggcattcttttttttttttttcccattgttaaacactgtgtaggccaggcacagtggttcatgcctgtaatcccagcactttggaatgccaaggtgggcagaccacttgaggccaggagttcaagatctgcctggccaactaaaaatacaggtgaaaccctgtctctactaaaaatacaaaaaaattagccaggtgtggtggctcacacctgtagtcccagctactcaggaggctgaggctggagaatagtctgaacccaggaggcagaggctgtgtgagccaagatcgtgccactgcactccagcctgggcaacagagcaagactgtctcaaaaaaaaaaaaaaaaaccaacaaaaaaacaacctttatgttgacacatgtattctctcaaaattcctttttgacctttttgaccactccgttagtcaaaataaattctcatgactgttagtttccaattgatataataattattgaaatctcttcttctaaatcaatcacaaaatcaccatacagatatttaaaaattagtctctttagtatactgtcttatctttttattacttttagcttgattgcctgtcctcttcaccaggttttactacttaaaactaatggttattgttccccaaattaaatcttagtcttctacaatgactcttgggtaaatatattaaatgcatcatggatcgttgacatttccaaaatataaaaaatttaagtgtttcgagtagtagtggtatatcaccagaagactgctcatttaagaattttgttttttgtataaatattattgtaataaatgtactttattggaataaataaaaattccccaaggagactagtttgatatactatatttcatcagttttaagatcaaggattgcttgagcccatgagtttgagaccagcctaggcaacgtagcgaaaccctgtctgtataaaaaatttaaaaattagccaagcatggtggcgcacacctgtggtcttagctacttgggaggctgaggtgggaggattgcttgagcccaggaggttgaggctgcagtgagctgtgatcgtgccactgaactccagcctgggcaacagaatgagaccccgtctcaaaaataaataaataaaaagagcatggtgtcatagtttacttttacataaattctttcttagtgttacatgaaataatggcatagaattttgactagtcgtcacctgttaaatttttagtcccattttgttttcaccagggaggtgttactccaacaccgtttgctgctcagcgagaaaaatactctaaaaaaaaatcttcatagttgaattgccagctgcttacatagaccaagttggacttcagaataagaatatactattatcattaaaacctggccacgtttaagccatggattaattattgagttaaatgggcagggaggcagggatggtgacctggagaacgtgaactgctatagaatcttgtcattattgaagagattcccaagatctttctaaatttccaaacttactgataccatgagaacattttttccatgatgtgctatattgtataatctaccttataagactattaaaattaatggtgccagaaaaataattatgtacttattgtgataacatgtatgacattaaccatgaactaaccttaatcatcaaagaaacaaaatttttagtcacaagtaatgtttagaacagatagataattgtaatagctatccatagaataggtagaaaatgatataacaatatagagttgcaagtctaagatagtcagctgtgccctactagcatagttagcttgcttctactcttaaaccttgtatcattttgaaatggaaagtatgtcttgtaaaagtagtggttactctgcattattgaccttcagattacctggagtcaaattcttgaatgttaaatccactaaagccaagggtctacaatgctataaagaataataacacaattaattctcttagaaatactgaatatgccagtaacatttattatatgccattatagagcatagtatcaaaattggatagatgtgacaaatttggagaagtattcttctttaacaaggcatcaggccatttgttttcctggagtgatactgtggtcatgccacatgcctgtgttataaactgcctactgctgggtattatagcatcattgaaaacctgtggctatggagttacaaaaaaatctagattaagatttaactactacagttttgatgtgtgacttttgacaaagtatttgaaaatattaaagccttagttttctgattttttaaaattagtgaaatggagatgatgatgaagttttcatgatggcaaaattaactgagttaaacacatataaagcacttggtaattagttttagcggatatatagtaaatgacagccatttgttttggtatttccccttcattcatcggtgtttatattggtctttataatatggaatggtatttattggccgtctacattttaaatttcttttttttttctttttcttttttttttgagatggagtctcgctctgttgcccaggctggagtgcagtggcgtgctatcggctcactgcaacctctgcctcctgggttcaagtgattctcccgcctcaggctcctgagtagctgagattacaggcatgggccaacacacccagctaattttttgtattttttgtattttttgtagagataggggtttcactctgttccaggccatctcaaactcctggcctccagtgatctgcccaccttggcctcccaaagtgctgggactgcaggtgtaagcttctgtgcctggccttaaatttcttaaaaataagtgtctggtttttaaatttttagtaataaatgatttttaactttattatttatttattgaatgtatactacacatgaaacaaacctcattctaacaaaaggattgtaacgaaaagattgttatatagtatattatgccttgcttccaagtaatatattggtctattttacttcaggacttgattttgtatgaattcacctcaattttctcatccacagaaaataacaaaattgaagttatttcattttattaacagggcaggtgtttgtttgccagtggcagtccatttgggccagtgaaacttacagatgggcgagtctttacaccaggtcaaggaaacaatgtttatatttttccaggtaaatgccaccattatttatgttatagagcaatagttaattatgtaaaaatacttaatggaattctttggaatgggagactgaactgagcaacagtattacagaattttggtataaatgtacaaggaaactcaaggaattcatcaaattcagcatgctccactttctctgaaaatttattcatattgttaattaaatttgtttttattatagaaataatatattgcatgatttgtaaaaatgcagaggaacagaatggcacaaaattatgtaaccctttctatctccccttggtgtacctccttaatcatacttctcagaaccattgtcaataatttgctgggagttcttctgatggttaccatcgtgactgatagatttatttcccaggttcaagcagttcccctgcctcagcctcccgagtatctgggactacaggcatgcaccaccacactcagctaatttttgtatttttagtagagatggggtttcaccatgttgaccaggctggtctcgaactcctgacctcaggtgttctgcccatcccaaagtgctgggattacaggtgtgagccaccacgcccagccaggtgttcttattttgtaagatacacccagtatactggtatcacaccaaaggaaattaataataattgcttaatatcgtttatcattacctcagttcaacaacttatttttattcccaataccttttttattctagaattgctctttctaaatagctacttttaaagcaaaaatggttacagtactcattgagctttttctggagaattattaggattcctttcaatgtttctgcctttgtgctgtattttccataaatttctagtgatcctcagttgtctctttcttttaagcaagactgtgttgagtaaaacaggaattttgtatgattttcttttgcacttgtgtcttttttcttctggtaggtctttccctgactagctgacagcaggctctaattaagatatgacaagtttatataggctggcatcaggcaagcatgtataactgttgtcaaagtaaagagggtatttagtctgtgaatatcctggtacttttctatatttttctccttttttttgcccctcatgttttcctatatgtctcttgagacctaacttctataatagaaactgtcctgtcatccataatctctttctagaacttgataatgttcaaaattaatgtgttctattcagtaacatttctatggcctaaaagacatgagggcaggaaaggaaatacttttctgctgattttaacaaagctatttttttaaactttttttttttagttccaggggtacatatgaaggtttgttatataggtaaattgtgtgttgcagggggtttcatgtgtagattatttcatcacccgggtaataagcatgctacccgataggtagttgtttgatccttaccctcttcccgccctctacccttaagtaggccccagtgtctgttgttcccttctttgtgtccatgagttcttatcacttagctccacttgcaagtgagaacatacggcatttggttttctgttcctgtgttagttcacttaggataatagcctccagctccatgcatgttactgcaaaggacgtgatctcattcatttttttggctgcatagtatttttttttatttatacacatggtgtatatgtgccacatttactttatccagtttaccattgatgggcatttagattaattctatgtctttactattgtgaatagtgctgcagtgaacatacacatgcatgtgtctttatggtagaatgatttatattcctttgagtatatacccaataataggattgctgggtcgaatggttgttctaaattcagcaaaaccatattttatatcatatctgagtattaaggaatttagcagttgattatttttatataacactttaaaatcctaacttaaataacagctatggataccataaatatagacattaaaaatgacctggtcaggcatggtgctctcgcctgtaatcccaacattttgggaggccgaggcaggaggattgcttgaggccagaagtttgacaccagcctgggcaacatagtgagaccttgtttcttccaaaaattaaaaaaattaaccaggtgtagtggtgcacacccctattcccagctagtcaggaggctgagatggaaggatcgcatgagcctgggaggtccaggctgcagtgagccatcatcatgccagtgcactccagcctgggcaacaaagtgagactgtctcaaaaaaataaaataaaatgacctggcatttgaggcagaaatgagcctaaaagcaggaggattggctgaaagtctgtttataaagcaacttaaaaaaaaaactgttaatatttgaatgacctagttgagcaactataacaaccggatgaaaattttttttaagactttaaaagggtcaaagggataagatattgactctaatggaatattggagaattctggaccaaggttagggagggaacaaatgcacagaacaagcttttgaagccagttttacagtggaaatatagaccaggaagaaagtggctaagaggtacagctgtgcttttcatggaaagtggacaagatcggcaccatgtccgagtctggcactacctcccactctggactgaaaccctaaagtgctgtaccttggattgggggtatagtttgcagcagcaatgggtgatttagaaaacctcaagcctctgttcgggactgccagtgcccacaagtgcccagcggaagcaaacaaaaatttctctgaaataagataatggcatcctagtcctcaaattatttttataaattttcaagtacaacctaagtagaaaaataaaaaaaaagataatgaggcacataaagagacataacaacagaagccaaaaccagcaaaaacaagaaaaacagacacactgaaaccctggatataccgtaaatgctatgaaacaaatatgcttattatgtttatagagataaaagccaatcttgaaaacttaagacaagtaccactaaattctagaattgaaaaatgtagtagtctataagaactgagtgagctgggtgtagtggctcatgcctgtaatcccagcactttgcgagaccaaggtggaagaattgcttgagcccaggagtttgagaccagccctggcaacgtagtgagacccccatctctataaaattaaaaaaaaaaaaaaaattagccaggcatagtggcatatgcctgtagtcctagctattcaggaggctgagatgggaagatcactcgagcttgggaggtcaaggctggagtgagtcatgattgggccactgcactccagcctgggtgacagagcaagaccctgtctcaaaaaaaaaaaaaaaaaaaaagagtgaatgtggcttatggcagattagaccagagagaattaatcaactggaaaatatctcagaagaaacaatccagaatgcagcacagagagaccaaaaagaaaaaaaaataggtaagggacatacatttcattgatagatctttaattgaagtcctagaagaaatgagaatgaagcagaggcaacatgtgccggcctcatggctgagttttttttttagaactggtgattgacaatcaatattcaaaaagctcacagaaacccatgtgggatgcataaaaagaaatctacatctaggaacattattgtgaggcttcagaatcaccacaaagagaagaatatgaaagcagtcagaacaaaaagatttccttcaaagaagcgaccgttagactgacagcagactcctcagtgacaataagataccaaggcagtggtaatgacctattaaagttgcttatgggaaatacttgccaacctagaattcattacacagtgaaaatatccttcaagaattaaagcaaaatgaagacatttttcagaaaaacaaaaaaccggggattcaccacctggcagactgtttttatattaaaggaaaggaaattttgttccttagggaaaaagaaaataatcccacatagaaaccctaaggtgtaggaaggaatgaaaagcaaagaaagttatgaataagtgggtgggtacaacaaaatgaatgttgtttatatagagtgaaacaaacatcacatgggattttgaaaaatatatatagagagaattaaaatgcacaacaacaatagctccgttaaatagagttaagctgttatgtgggacttacattgattgacaggaaggtaaattaaaaattataatgtggagctggggacattggctcacacccataatcccagcactttgggatgtcaagatgggaggatcacttgaggccaagagtttgagactagccctggcaacatagggagactctgtctctacacacacaaaaaaaatttaactagccaggtgtggtgacatgtgcctgtagtcccagctactccagacaccgaggacagatgatcacttgagcctaggagtttgaggttacagcaagctttggtcgtgccacagcactgtagcctgggcaatagagcgagaccctgtctcaaaaaaaaatttaatgtagaacgttggtggttaaagatgcatgatataaattttaggataaccattaaaacactacaaagacttcctgtttatggtaaggtaatgttgggatgaaatgaaacaacaaaaatccgaaaagcaagaaaaaagaggaaaaggaacataggcaagacaagatgagatgagagtgatgagactaaatgtttgggggctaaatctgccccaattacttgaaaaaaaaaaaactaaaagtaaaagtaaaaaccacattaaatctaaatggaccacattctctacttaaaaaaatgctattaaccatgtgatcttctcagtcatgaggtaatctggtgactacccttcctcaaagccagttgggatattctttgaatagagtaaaacagtgtttctaggctgggagacaccagacatagttgaggacagaggtgctagaaaataggaagtttaaaagcatgtgcggtgatgctcagaggaggtaaaccccaccctcatgctcatagcttccaatcattttctctagttcttaactcttaaatgtgagaaatgcttgaagattactagtcatctgaagaaagtctctttattaaagattttcataaaagagaccaaagcagacaaacagaaaaagacatcttggggaaaaaaacaaggataatgggaagagaaggaaagttttaaaaattatcaatatcctcagggggacaaaatattatatcctataaagacagatttttattttttaaaaaaatagaaagcaaaacaagctcctaaaaataaagtttgatagcagaaagaagaaaaagatgagttaagtcacctaaaaagagagcaaaggacaggagaaggaaaataaagaaaattagagagccaatccaagaggtacaacatcagaaaatataaatgtcagggaacaagaacagaaaaatggagggaagtgaatcctcaagacttcatgaacatttcccaaaactgaaagactcgtgttttcagataggaagcgcctactcactgaatgctaaacatgatgaattaaaataatgcacatcaaggcacagtgttatgaaattgtagaccgttaggtataaaaataaggatctggctgggcacagtggctcatgcctgtaatcccagcactttgggaggctgaggcaagaggattgcatgagtccagaagtttgaaaccagcctgggcaacatagtaaaaccctgtctctacaaaaaataaaaaaattagccaggtgcgatggtacatgcctgtaatcccagctactcaggaagctgaggtaggaggatcgcttgagtccagggaggttgaggttgcagtgagcttgtgccactgtactccagcctgagtgacagagcgagaccctgttgccaaaaaaatttttttttaaaagggatcctacatgcatccagagattaaacgaaaacaatcacctgaaaaggctctgaactcagattgatgcttctcaccagcactggaagctagatggtattggaataatacctcacagttctgaaggaaaaatatttccaagccagaattctaaacctagacaaactatcaaatataagtagaaagaagtaaacaaacacattttcagaaatgcaagatttcaaaaaatatatatctcccatgcactgttcttcagaaagccttgggagaatgtaccctaccaaaagagggagtaataaactaggaaaagttgaatttgggaaatggaatcaacttagaaagaagcaaagaggcctgtaatgataaaggggttttctaggatgacagctccatagctggaatgggggacaaccagaccagaatggagctttagtagatatattctagagcaggaaattcgagaatatataaagtagctaaaatagaagaaaatgtagacaattgagtgagagttcaagggtgaaataacaatgttaaatactaaaaaatcaaagtaaaggaaaaaggacaattattaacttcaggaaagacaaagttatgcagaaaaggaaaagtaaccatgatataaacattgaatattgattgaaccacaattatgctctaactatattgggaagaagaaagaaagctgaaaatatgaaagagcgctaaatatttactcctacaggaaagagtcagtgatctccaaaacagaaaatgcaagatcagcacaataagagaaggcaaaaaaaaaaagaaaaaaaaaaaagagagagagagagaaaaaaaaatcacaagaaacataagttatttaagagtgagagagagaaacaatcagctaaaaaaaattgtcattgcctctgtagagcaagaagtggagtgttagaggtgggctgggaactggagttaaaacaagcgttgatgaattgtatgtatttgtcattttcataaatgtaaaaactaaactgagaaaagccatttgatatttctgaaattacttagcgaataagaattattaaagatcgtttgattttaactcagatttctgtttcttcttggctgttttctgtttggggggagctgtttgcgatgtggatggattaccatttatttgcctgaatataggaatttacttctttcataatttgaaaagtgaccatactagtaaactttaaaatgtgttctaggtgtggctttagctgttattctctgtaacacccggcatattagtgacagtgttttcctagaagctgcaaaggtaaatgttttaaatgttgtttattttataaaggatgaattataaagatgagtagatctgaaaattaaaggcagagagagaatgggttaaatctgccttattaatgaaaaggaagttactcaaattacttttatgatttgcctatttatgcataaaattaatttttttaatcatgacttaaatttttgtaaactgaatcctctcgttttaataacacttagactatacttgcaatttgtatatctgaatatattgtgacagcatagataactccttgcatgtttttaatggacaagtactggtattatttggagtgctggcctatgggagctccagactttgaagtatttctgaagaactcacattaatacaattaatgtctgttttcaaagtagccattgcaattaagccaagctctacatgtgtaatataaagcagaatataatcaataagtctttaaatctggttatttattgtttagtgatgaacagttttaatttctgcagtggtttaagtgtattccttcaagaaataagaggaattatattacctgttttactctctgtttccccaatgctttttccatttactgggtccttattctgttatttaaacaaacaaaagcaaaatgctgtttttctcttcaggccctgacaagccaattgacagatgaagagctagcccaagggagactttacccaccgcttgctaatattcaggaagtttctattaacattgctattaaagtaagtaataacttaaacttcttcacattaattttaatgacattttcttatacaagaaatacaggtttattaagataaatctgaaacatttagaaggctgcaaagaagaaattttaggcccatattcttactaccagaatataacacacatgattattttgggtttgttgccttctagtcttttttctttgcaaacacatacatgcatacacacatgcatgtagtcacttgtgcctttttgaaaaattgttttaaagaatagagataggggtcttcctgtgttgcccaggctggtctctaaccccttggcctgaagcgatcctcctgccttggactcccacagtgcttggattactggcatgagccacagcacctggcctgtgcccattcttataattggtttcttactgcactttttccccttaatatattgtaagtcttttccatgtaacttaataataattctcatgtatgtgatcattaatgctgcatggcattctctttattattttttcaaaatttgtttcatcatttctctgtttttggacatttaagtttttagcttcttattgttagaaataacactgtaggctgggcgcagtggcttacacctgtaatcccagcattttgggaggccgaagcaggtggaacatctgaggtcaggagttcgagaccagcccagccaacatggtgaaaccccgtctctactaaaaatacaaaaaaagttagccaggcatggtggtgggcacctgtaatcccagctactctggaggctgaggcaggagaatcacttgaacctgggagaaggaggttgcagtgagctgagatcgtgccattgcactccagcctgggccacaagagcaaaactccatctcaaaaaaaaaaaaaaaagaaagaaagaaataacagcgtaatgaacatctgtctttacagataaatctttgtgtgtatttgtgatggtttttttttttttttttttttttttgagacagagtcttgctctgtcgcccaggcttgagtgcagtggcggaatctcagctcacggctcactgcaacctctgcctcccaggtttaaacaactctcctgcctcagcctcccaagtagctgggattacagatgcccaccaccatgcccagctaattttttgtatttttagtagagacggggtttcaccatgttggtcaggctggtctcgaactcctgacctcaggtgatccaccggccctggcctctcaaactgctgggattacaggcgtgagccaccacgcccgggctgtgatggtttttttttttttttgggataaattctaagcttaagaacaaaggtttttaaggtgttttaaggcttctgatgcatattgtcaaatgagctcttcagaaaaagtactgatttacattgcagcaattagatatgagtgtatctttttccacactttttccaatacttagaattatttttttaatcttgcatatttaataggtaaaattgtttctcattattaaggcattattagtgagattgaagaattaatatatatatattaagtgtatatatactgtttgctgtggtgcagatattttcccatttgtcatttgttttaactttatagaattgtttgacatgtctattaaaagtgttttatggaattatttgtttattttgtggattctctcctcaccttttatgaatattaatgccttctgtcactccaaaatcataactgtctacttgcattttctaaaataaaacttttttaatctctctgggatttattttaatgtatgatatgagaaagggaaacattttttcctgagtagttaaccagttgccccagcattatttattgattaatgcgtccgttgtttacagttaattgggaattgaatctgttcctgggatttctattcctgaccatttttgtttactatctgacactgttttaaattttataatgtgtataatgtaacatttagtactttatctttcccatcattatgctttttcagtgttgtcttgactgttctaaattgttttcttctggacaagtttttgtatctgcttttttaattttaaaaaactctgcaactttgtatgaaattgttgcatttataaattggtgaagttgggtctttcagtattgagtattctccaatcactatctctctttacttattaagatcttttttaaaaagtgtttcagtataattttgttttcttcatctgaatatggcatttttacttttttctaaatatttttaaatttctgtttttctaacaaagacttttttttctttccaagtatcttctcattgatcatttctaatatataggaaaaggtaggaataatactaatttgaaaacattcatttttatgaatttacttgatgaccagttttttgaacaatcttattttaatagtttttcatttcatttggaattgttgagtttttaattgtctgcaagtaattttttctttttttaatatgcatagtccgtttttctctaactataaatcagctgaaactgcagaatagtcttaagcaattaggttgataagggtattcttgtatttttttttcaatttagagacagagtctatgttgccaagctgatctcaaactcctaggctcaagtgatccttctaccacagcctcccgagtagctagaggcacatgccaccacacctggctaacatctttgtatgttaatattaaatatgatgctagcttttgattgaaataagtattttctactttttaaaagaagtagtcttctatttctagattactaagatttttcttaaacattaggattgactgtggaatttatcagccacaatttcaacttccatacagttgatcataaaattttatcattttgactattaaatttatttatttatttatttatttattttgaggccgagttttactctgtcacccaggttggagtgcagcgacgtgatctcagctcactgcaacctctgcctcccaggctcaagcgatcttcccacctcagcctcccgagtagctgggaccacaggcatgcaccatcatgtccagctaattgttttttgcatttttggtacagatgggggtttgcattgttgcccagactggtctcaaactcctgagctcaggagatctgcccaccttggcctcccaaagtgctgggattatagatgtgagccactgtggccagctttgactattaattttattattacattattttggtgcctgtaacctaagcaaagattgggaattggtaaaggatggtatgttcagggaataatagttgagcctgggggaacaggtagggaaatggcatggaagaaaatttgaaagttatattaaagccagctgtacaaatatacaaatgccaggctaaggagtatgattaccttctactgcaaaacagttgaagattttagagcccagaactaggatgatagagtccaactttagaatttatagaatgatattacaggtgggagagattttggaagatattagtcagttaagagattactgggccaggcagagtggctcactcctgtaatcacagcactttcaaaggccaaggcaggaggatgacttgaggctgtaagtttaagaccatccctggacaacaaagcaagatctcatctctaccaaaaaaaaaattagccgggcacagtgatatgtgcctgtagtcccacctactcaggaggctggggtgggaggatcacttaaacacaggaggccaaggctgcagtgagctatgatcataccactgcactccagtgtgggtgacagagcaagaccctgtctctaagaaagaaaaaagagagagaaataattggtatatccaaatgagaggtagtacatgaggtcatagaaggagacctctgcttaggattagtatagcaacagaggcccaggttcatgtctctgcgtttccccagaggcaggagtagagagtgtgctgtgtctgcagtggcataggcttttctttttaggagcaaataaggaagtggtgagtagaggaggcagagctttgtgtctgtccccaccccaaatagccactgattcacccctttggctctatgagcagggctgtgtgtgctcctctgacagccaccagtcaccttctgcatgcctccaggaccaaggggagctttctccaatctcatgccttgcccgtaatctttttctgtggttactaccagcctgtgggaaagagatttgcagtgagtgtgagccccccttatgtctaaagcttgcagttgttccagaataaaacactagctcacattgacctttggcagttccttaaaattttagctgacttcttattgtatgcatggtggccactgcctcattctccctcccatgctctgccacaagtgagagtttctgtgtctagtctgccgccttctctccttcattcatttatttataaatttatatttatttatttatgttaattatgctgctcactggcttcagaacacctcccactgcccctcacatcaggcaggccacgtgttcagctctccaaggtcggaaggaatgaggaaaaatgtgtttattccatcctcctggaagcaaaaatctctgcctgtctttttatatcattcctgtttttcctgttaagtacaaaaactgagaagagcaatttggtcaacaaactgtactaatgacatgttatgtttatttggcccttaggttttttgtttgtttgtttgtttttgagatggagtctcaactctgtcgcccaggctggagtgaagtggtgcaatctcagttcaacacaacctctgcctcccaagttcaagtgattctcctgcctcagcctcctgagtagctgggattacaggtgcccgccaccacgcctgactaatttttgtatttttagtagagacagggtttcaccacgttggccagcctggtctcataaactcctgacgtcaggtgatccacctgcctcagcctcccaaagtgctgggatcataggtgtgagccaccacgcccagccagcccttaggtttttaacctcagatctttattgcagttacctgccactgaggatctagcccttccctacttctttttcctagtcagtgataataaaatattagtaaaatatgttttctataatagaacagaaaacaattgaacacattttctatcacaaaatacactgagattgagttcttggtaccaaggattattttttaataaccatcttattctgagatttttcttttagaaagttgaaatatgaaactttaataatggttaccatttggaatgagaattagaggaggggagcgacatcttataattgtttgaattttttctaccatatgtcactacatttttttaagttaaaataaaacctgccgggcatggtggctcatgcctgtaatcttagcacttaggtaggctgaggcaggcggatcacctgcggtcaagagttcaggagcagcctagccaacatggcaaaaccccatctctactgaacatacaaaaatttaccaggcatggtgttgcatgcctgtagtcccagctactggggaggctgaggcaggagaatcgcttgaacccaggagatggaggttgcagtgagctgagatcgtgccactgcactccagcctgggtgacagagcaaggcttcatctcaaataaataaataaataaatccataacagagcaaggctccatcttaaataaataaataaataaataaataaataaataaataaaaccatgacttcagaactttactgtgtgagaggtgctgtgctaccctgtgaggaagtgtttcacattcctcattttatatcagaactgaggttcaagggcttattctcaccaccaatcatggtgtgtggcttgggtggagaatttgaaattcactcaagccacctttggtggggagtagtcgagcttactgttgagggtctaatatctagactcagaatgctttgggtttgaaacagctctcaagtaactaccttgggcaagttacttaaactcctctcattcctcatatgcagaatgagaataatgatagcacttatctcctggggttcttgtcgagagtaaaggaggtatccttgtaaaacacatagaaagtgcctggcactcagtgatagtggtgtcagttcccctgtataggttctagccctgacttcacctgaccttatagttctagtgtctaaatcctgatttataataattactatgcctcttaatccaaattctagagcagaaacctctctctcaccttgggttaggttttcttcctggtcaagttggctgtgattaggaaatagtctctgtgcccctctagaaaggccactctttcagcaagactgggaggaatgacataggctgggcaggttatctaaatgtatttactagaatgacacagtagaacttaaatgtgtttggttttatcttttaaactttccatagtttccaaatgttttgaaaggagtcaaagcaatgttattttttactgtgaaaaaagaagaatgccattcttctaaacttattttcctgtgttataatagtacgttgtctctctaataggttaatactcagagcctacacaataaccttacttatttttcaggttacagaatacctatatgctaataaaatggctttccgatacccagaacctgaagacaaggccaaatatgttaaagaaagaacatggcggagtgaatatgattccctgctgccagatgtgtatgaatggccagaatctgcatcaagccctcctgtgataacagaatagaagcactcccctgataaatactttctgtgctccagggaaccccttttttcagacaagaagagataatgtcttcagttttatggtgttttctgtgttttgttctccctgaccactttggttgatgtattttttccatgcgtctccacatctgttggggtagacgtgttgattgattgcattgcccaccagcaccctacaatcagatagttgtgatgctttaattctaacatacagcccgtaccacatccaggagatgtaaaaagtgtgtttgtgaatgtcttcacttgtactctaattcagacttgccaaagtatttgctatttactattatgggtaatactcttctctggcctagttcttacagagctactaaaatagaaatttacttttatggatagaagtacagaattttgagaagaaactaaattttcaccaaattttaaggaaaaattgtcattatctaaaaatgttcttatatatctgcttcatcttaccttcatactctgaaattccctatagcagacagagctagggaaatattaaaaatttaccctatttattttctggaactaaatcaagccttaactataacattatgagagtaatgggaactactgctggctttaagtaaataaaagtcattgttttcaacagtgtataaaaatcatagtgtaacctttttatttaataaatatcttacatttaattgcttcagttatgctatcttattgcccaactagaaatttagatttgcttatgaaaaacacatatttttgttacttctagatgattctaggagggagtataagatacctaatcatatgggaacatcacgtgactttttaaatctaaattagtcatgcttcacatcaaaatgagtcatatttaactggagaaactatgcccttattccagaactgatgctctttattgcttgagataattttggaatgttactatgatactgtttctttgaatatcattagtagtgacaactctttctccattgaaggcagacttaatttttttaaaccaccaacattaatttagagctaaatggggatgaataaggttggtgttcatctgggaaatgccttttttaatcccagtaaaatgggtaataatggctatccagaacagttttcttgtgtggcttgcatattgaagaattctaaaggaaaatatatctgcctaccatgcttgctcttagggaagaaaacttaaatgctcattctaggatagtaacaacaacagataattcatcgataatatgagcatgcacagtatttgatattgctctgtaggaaaaaagagacttcatttttttcatcttctgcctatgaatacaaattgattctttttttttttttttttttttgagacagagtctcactctgttaccaggctggagtgcagtggtgtgatctcagctcactgcaacctctgcctcccaggttcaagcagttctcctgcctcagcctcccaagtagctgggactacaggtacacgccaccacgcccagctaatttttgtatttttagtagagacgggatttcaccatgttggccaggagggtctcgatttcctgacctcgcgatccgcccacctcagccttccaaagtgctgggattacaggcgtgagccaccgcgcccagccaatttttttttttttttttttgagacagagtctcgcttttgtcgcccagtctggagtgtagtggcatgatctctgcaacctctgcctcctcggttcaggcgattcttctgccttagcctcccaagtagctgggattacaggcaccggccaccacacccagctaatttttgtatttttagtagagatggggtttcaccatgttggccaggctggtctcaaaatcctgacttcaggtgatccacccactttggcctcccaaagtgctgggattacaggcgtgagccaccacacctggtccaattcatcataattctgaatataatttaataattttaaaatggtcgcaatggcattgccatttggagtatgggaaaatgcagttggttaattcattgaacagattagtaaagtcagaagtctttttcataacatacggtcacaattcctttcttttaattaaagacaaaaggtttatgggttttggtttgtttgttttagatatggggttttgctatgtcacccttgctggagggcggtggctgttcacaggcgtgggtcatagagcactgcagcctggaactcctgggttcaagctctcctcctgcctcagcctcctgagcagcttggactaaaggtgtgcaccaccgcacctggctgagaggcttctgtttttcatgttccctttatcaaaacaaaatcacgcctaaacatactctctgtgtgaaatcttgattttagttcaacctaagaaatataataaatataaacctgtttcttgcttagtgtttattgaaggcaggaacgtatgctgaattaaagtaattttactacgaagtttgcttattaagtatgcctggtacagtcttcatggaagttattaagtattttaaggaaaaaaataggctaaatggcatatagcctgcttaaataaaataattctatttttttaaaaagctcccaattgtcattgttatttaccagtcaatctttcaacaagtatcaattattggatgtaaattaaagtaaaattgcttaatatttaagctaagaatacaggaaggactatgagcattgaggaaatcgggggaggccagaatggcatcaagctggaaaagaaattaaaacattaccttcgatgagactttacctagcaagaaggtaattattttgaataacagcaatagagaatcttttattttgaattgagaagaaattctgatgattagagtgtcagtaagtagtaggaaaaggtaagaatacatgtgtttctaatctcccaccaccacctgttgtatggaacaaattggattactagcaagggtaaggtttattgacaatgagaagttttagtccaagattttagttaaaatattttaaaattttttgattcataaccaagaagttgcctcagatcactgtgaagctttaaaatgcaggtgcctttgctcctcctccctccaggcccccgggggcagagccctggctggtgtctcttcaggaggacccctgacacaccgattctgccctcacaatcactgccttaaagcaggcagcagaatcttttggagaactaacaagattctgatgctgatgcatagggcctggggtggggcctcagattctgctttttttttcttttttttttttttttttttttttttttagacagggtctctttctttttcctttctcactcaggctgcagtgagtggcgtgatcttggctcactgcaacctccacctcctgggctcaaacgatcctcccgcctcagcctcctgagtagctgggactataggcgcaagtctatgcaaccacccagctaatttttgtatttttagaagagtgggggttttgccacgttgcctgggctggtctcgaactcctgacctcaagtgatccaaccacctcagcctcccaaagtgctggaattacaggcatgagccactgcacccagccaagaatgtccacttctgacaagctcccaggtgatgcctatgctgctggtacagtgaacaacatgctgagaggcattgctccaggatactgcatgtagtgagcagttctttagcgtttatgtgtcatatacttcaagttacatgaaaaagatcaactgaaattatgttcttacacagaatagttttcatctagttttattatgtttttacaggctgtttacaagaacaaaaatagagaatttttgaacatatttttctgaaaacataaaaactagaatactctttaattctaaattatagatttgtagcatacttagtaaacttagtaaccaattttcatttgtaaaagattagctatcaaatggacatttatttctcttagttttcttatgacatgacttgccttatatcctttgtcctttttctgtaacttgtcagcctctggagaaataggattttacatttttgcaaatgagttgccaatgaattaagatcaaaacgtcattattaaggagtatgaagcattatttactggctctcagataacagaaaacccaaaagggatggtggcggagtgaagaaagccttgccttgggaaaaatacttcaaatgctcccatagttttttttcctcaagcccagtcagtatccttcaaggataactttttcataccttttttttggtttgtttgtttctgctagctttatgacagaggttataatattcttttctcctctcttctttgacgtgttacgttgtcttttttttttttttttaacttcttcatactcttaaaaagctccagaatggccaggcgcagtggctcacgcctataatcccagcactttgggaggccaaggcaggcggatcacgaggtcaggagatcaagaccatcctggctgacacggtgaaaccccgtctctactaaaaatacaaaaacttagccaggcgtggtggcgggcgcctgtagtcccaggtactcgggagtctgaggagtgaacccgggaggtggaggttgcagtgagctgagatcgcaccgctgcactccagtctgggcgacagagcgagcctccatctcaaaaaaaaaaaaaaaaaaaaaaaaatctccagggttctgttgaattcaccaaaatggggtcagctctggtgagcctatgtaatactcgagaacattaatataaacccatagctctttactgggcttccatttaaagggaagtcctaagaatgaaatggcaccagcatcctgtttccatccaagacaagaccacacgtgttcaggtgccatgtattcatatagctctcaactgattggtgatttgcactttgtgcatctaattattaaaatgaaactctctacaggtgagctgaagtaacatacttcatatttaaaaagttcacagcaatttgaccatagaaaactttctcatctgaaatcagggtaagtttttttaatgtaagcagagaaaaaaataaagcagtgttttatttcaaatttcagtaagttcaggtgggcctaattaagacatgactattattacaaatcctattcttgccagaagttacttagatagattagtgattagattttaaaaacattattttcctttcttgaataaggaaaattgtgcatctcaaagagaaaagtaaatatggaaatatgttcatagttcagttgcataaaatagacacattaagtcaagtgatttgaatgcttagtgtcttttggtaaacagcattttgtcaacaaacttttcatatggctatagaatcttgttttttccaaataaaaactttgcaattgggagttattcctccattcagcacactttttaatgttaagactaggggaaacttgtgggtatatattcagtggttttcaggattttcttttatgttctagaaaagtaatttttcctttcctagttttaagtatatattcaagcaaatcgttgattcctatacagccattggattatcaccaacacatttggtatatacagtgggccgataatgacaaactaaagtttgtggttaatacctactctataccagacactgttctaaggatccgacatatttaatcctctgtttaccctctgtttctgtgcctgatttacagacagagacagaggcacagagaggttaaatgacttgtcaaaggtcttatgatgtgtggcagagcctgggtttttagctcaaacccctctcagtgaagaaagccttctgtgtaggcaatttcatctaataccttcatgaattgttacttcagatgagaattctcacttattcttttttttttttttttttcttttctttgagacagccttgctctgtctcccaggctggagtgcagtggcgcaatctcagctcactgcaagctccgcctcccgggttatgccattctcctgcctcagccttccgagtagctcggactacaggcgcccgccacctcgcccagctaattttttgtatttttagtagagacggggtttcaccgtgttagccaggatggtctcgatctcctgacctcatgatccacccgcctcggcctcccaaagtgctgggattacaggcgtgagccaccgcgcccggcctcacttagtcttttaccagttcatctgatttttactttgttcccatttataattcaaatataatataaacgtcttattcatttagtcttcagcattttaagtattcgacacgaacattaaagatttggtgttgaatttaataaattacaccaaaaagtctcagtagccaattcactaacatcttttgatttggtaatcttcacagaatcaacaactgttaacacttctgtgcaaataaatttcagttgtgcttatatattataatattcactttaggaatccacctgtcaatttgcaattcaattataaggtatattttaagtgatatctatgtattgtatacacatattccattgaaaggtgagaataattagaaagtagtaatataaaaatgtgtatgaaataagaactttcttaaaagacctagtttagctaaatatatgacaatataaaatgtctgcccaatgtttgattatactttgtctaatgacctttaaatttaactgaaattaaaaccgtacttttgcagttgatatttttgtgttccctttgttaacataccaagcactaattattgacttcaaggaagccacgtattgcaagtcattgcttagcctttcacatctgagtgttgataagatgacggaatgggtagtcttgtagtaattgcttatgggaatgctagtttaagaggaatgccttgtatagaacatattataccagattgacttgttaaaaatggttccaagaatcagtctaaaaacttcagaattatgtgaattattttttctctgttgtgatatgttgtaatgagatgtgtgttcttatattttcttagtaaaattttcttaagcataaaatgctttatgatcttgtttttaaaggctctgtgtataggacacttttaaaacttggtaatataaaccttaacacacactctctctctttctctctctctccagaatacttgatctcttgggaatgtattgttggacttaaattcacctatggagtactagttttgctcctcatcttttcattcccttttgttgagctccctaccctattcctctccttacttgatttaattatgatactaaaggaattctctatcgccttttcttctccccacttctcacacgcaaacaccaagaccctaatgttaagatactaaatcaggagagactatgttgattttgtgatgaaggggggaattatataataacaaatacctactgagaccctcagataaaagttctttttttgcctcaggattcatgaatagctcccaggagtccacgaagcccctgaaataatacatgatcctatgcttgtgtctcttggagagagagagtccatcaccttcatgaaagggccctttcttttcccgggataggttgagaaaaactagcctacgcctctttttttttttgagacaggttctcactctgtcacacaggctggagtgcagtggggcgatctcagctcattgcagcctctgcctcctgagtgcaggtgattctcccacctcagcctcccaaagtgctgggattacaggcgtgagccaccgtgcccggccggcctacaccactttttgacaactccatcatacttctttattgggagggctggcatggtgaaaggccccaacttgcatggaggctgaaataggtagccagaccaataaaggcctatcgttgcctctatagcaaataacacctagatacctcagcaagagcagtgggtcagcagcacctccttccccaaatacaactgctctgttcttgaatcctgaacagtgtggacctcaaataccacctggtctgtgtctaaactgaatagaatacaacttcaaaaacaaatgattttctttctcaagctgatctaaaaattacacttacaacctcgcagatctccaactgctgggaatataagtaactaccatccccaattgctgcgctctgaaattcatcatggctttcacatggaagccatgcctcctgtgggctgctcttagccagtgacttctcacagcagggatggtatgacaggcctattcctggaagacaggagagtcctctgatgcatagctttagctcaagccctgccccgtggccttgccaagctcagaactgtacttcaacctaaggcacttcttcactcaacctctctttctttcctctctctttcacttgggatcagatctgtatgacgctatgaaggctcttgcaggctcttcctggctccctccccaccttcacagacatttcttctcatataaattacttgcatatcagctgggtacggtggctcatgcctgtaatcctagcactttgggaagctgatgtgggaggatttcttgagctcagtagttcgaggccagcctgggcaacacagtgagacctcatctgtacaaaagatacaaaaaattagccagcatggtagtgtgcccttgtagtcccagctactcgggaggccgaggagggtggattgcttgagcccagcaggtcaaggctgcagtgagtcctgactgagatgttccttcttggatgacccagactaacagagcagttgattcaggatgtagttttgcagatgagaaacactaaaactattagagctattggtaaggtaattagactttctagattttctgatatgatctttcttccagatatactgtctcaactccagaccatgttgtgagctaacctaaaccaattcggacacatgctcccaaaacaggtactttcaagtcaataacaataccaaagaggtttgaggtgggtaagggttagctaccccctacaaccttactactaggttttaataaaaacaagtctcagaccaaattctgccatgtatacaaacattcattaagcaaatattcattaataagcaggcacaggccaggcatgatgactcacacctataatcccagcactttgggaggccgaaacaggggaatcacttgagcctaggagttagagatcagtctgggcaacatagtgagaccttgtctctacacaaattaaattagccaggtgtgtttatatacacctgtggacccagctacttgggaggctggattgggaggatcgcttgaggctgggatgtcaaggctgcagtgagtggagactgtgccactgcactctattctgggtggcagagtgagaccccgtctcaaaaaataataagaataataactggccgggtgtggtagctcactcctgtaatcccagcactttgggaagccgaggcaggtggatcacgaggtcaagagatcgagaccatcctggccaacatggtgaaaccccatctctactaaatatacaaaaaattagccgggcgtggtagcgggcgcctgtagtttcagctacttgggaggctgaggcaggaaaatggtatgaacccgagaggcggagcttgcagtgagctgagattgcaccactgcactccagcctgggctacagagtgagactccatctcaaaaaaaagaaaaaaaaaaaaagaagaagaataactaaataatttaaaaaataagcagacacaaaacaattcatacttcttagtctactcaggctgtcataacaaaatatcagaaactgagtggcttaaacaaaaattatttcttcacagttctggaggctggaactccagcactaaggacacaaatcctcaatcgggccctacccttatgacttgatttaaccttaattccttctgtaaagacctcatctccaaatacagtcacattgaggtttagggattcaacatttgaaatgtggggagagattcaatttagtaaaggttcgctcaaggagaagaacaacccagaggcaggatttttatgccctctacttggcatcatgaaatcagaaaaggttctccccaagacagccagggaatccaagctcaggtgccactccaaggcacctataatctcaatagattctttagtttgttaatccaagggtggagaaaatctctgaattatttcagccaatctatctatattgaataccctgcattttaccaatgagagcttctttctaacattcatcatgctaacaaaccaataaaatccattttttgacattcagtatgctaatttgcaaatcattggttttctatcaaaataatagcagaaggtcttgtggtagctacttttgcagtgcagctcttcctgatttaaggcaatcactccagtactcttattggctgaccaccccctaaaattaaagcttaaattagttgacaaatacttaataatacatcagtagactgaaatacttaaaagcaaattacaggtggggcgcggtggctcgcgcctgaaatcccagcactttgggaggccaaagcgggcggatcacttgaggtcaggaattcaagaccaccctggccaacatggtggaacttcatctctacttaaaaatacaaaaattaggcaggtgtgtggcaggtgcttgaaatctcagctactcaggaggctgaggcaggagaattgcttgaacccaggaggcaaaggctgtagtgagccgagattgcaccactgcactccagcctggacaacagagtgagattacgactcaagaaataaataaataggctgggcatggtggctcacgcctgtaatcccagcactttgggaggccaaggcaggtggatcacctgaggtcagaagtttgagaccagcctggtcaacatggtgaaaccctgtctctactaaaaatacaaaagctagctggattgatggcaggctcctgtaatcccagctactcaggaggctgaggctggagaattgcttgaaccagggaggcacaggttgcagtgagccgaaatcatgccattgcactccagcctgggtggcaagagcaaaactccatctcaaaaaaataataaataaaataataaataattaagtaaataaaataaaattgtagctattgtaacagatcatctgtcccaatttcacttagaaaagagtcactacagatttggaaggatagtatttaaaaatgctatcaagaagggtatggaaatagttcatttgagtgaaatccaagtgccactatcacacacacacacacaatgtagaatgaactgaggaagaagcaggcttagatgaagaaagcaaaagttctgtttgggtcagttaagtttgaggtgtgtattagacacgttttgggtgacacttgacattcaactctgttattttggagtgatttctcactatgtgtggtgttgcaggggataaggtgttctgtcctcctctatagaagccaaagctggtgtggggaggatccgtctgctccctacctcatggcaaccaagaacagaggccagtatctactggtgttgtgtccatggcaatgccctaagaaggctctgaggcaagaccttgactgtggttcctgctgcctccattagctcatgttttctgtcagttctgtggattatccagtttcctttcagtctgcttaaattagccaaaattaacttctgttctagtaaccaacaattctaactgacatcgaatgaagaagatcttagctgtttataagggtgtatatattagatcattcaaccagactttatgcaaaatgaggacaggagttgtgttttttattttatatagtctcaaaatctctttctcacccagtccagggctctttctctctttctttctttccttctttccttccttccttccttccttccttccttccttccttccttccttccttccttccttccttccttctttcctccctccctccctccctccctttctttctttctttctttctttctttctttctttctttctttctttctttctttctttctttctttccttctttctttctttcttttgactagtcaagcacaatagtgagaagggggtaaagagtagaacaaggagctgaatctgtaactgactgtgaacaatctattgaggttaatcattacctttggaccagtacagggctctttctctactctataggtttaagcagtgcttgatttcacataatcaaatgatcaacaatttctgactataatttgaaagaaaaatagtgatgaagcctgccatgttagcagtttgttggctctaaaacttgcctactacttttttactaatttgtaatcaaaggcactattttcccgcttcattctatgttaattacctctgtagacaaagttcatttactgattctaggagaccactattatattacatgtagattacctctaagcagagagcaagagagaaaagagaaagcagctttctcttatctgtataaattatagtattagatgtgttaagtatcactttgaaatgacttaaatttgaataacacattacaaagcatttcaacaagcaccatttagtccttatagcaaaagtttaaggcaaaaagagcaattattaacctcattctaccaataaaaaaaaagaggctctgaaaagttaaatgaccacctgatccaggtcactcaaatacaatgggacaaaatcaagatttaaattgtattttgacggaaaagtccatgtggttaagcaatgaaaaaagacaaatgaaaaattgggtaaaagatgtgcaacttatttcatagttaaagagttattggccacgcgcagtggctcacacctttagtcccagcactttgggaggccgaggtggggggattgcttgagctcaggagtttgagacaagcctgggaaacatggcaaaaccctgtctctacaaaaaatgcaaaaattagctgggtgtggtggcacacacctgtggtcccagctacttggggggctgaggtgggaggatcgcttgagtccagggagatcgaggctgcagtgagccatgatcacaccactgcactccagcctgggtgacagagtgagaccctgttacaaaaaaaaaaaaagagttattatccctaatatatagaaagcaccaaaaaaaaaaagagaagataaaggccactaatacaatagaaaactgaccaaaagatatgcacaaaaagttcacagaaaaaaatacaaatggggccaggtgcagtggcttacacatgtaatcctagcactttgggatgctgaggcaggcgcatcacttgaggtcaggagttcaagaccagcctggccaacatggtgaaaccccgtctctactaaaaatacaaaaattagctggcctggtggcgtgcacctgtaatcccagctacttgggaggttgaggcggcagaatcacttgaacctgggaggcggaggttgcagtgagccaagatcatgcaagtgcactccagcctgggtgacagagcaagactccatctcaaaaaaaaaaaaaaaaaaaaaaagcaaatggatcttaaatttatgaaaacatactcaacatagcgcacttatcaaagataaatgccattttaaactacattaagatattagattggcaaaaatccaaaagtttgacaacattattggcgatgaagatctgaggaaaaaggcactctcataaattgcttaacggaagtcaaaatggcacaatgctcatggagggaattttagcaatatatagcaaaattatatgtgtatttaccctttaagccatccatcccacttggtataaatctatgccaaagatacacttgcaaaaataaaaaattacttatgaacaagactatttgttaccatactgtgataacgaaacaaaacaaaaagcagaaagcaaaactggaaacaacccaaaggactgactgaataaaatgatacaaaatcacacagcaagtactagataactgtaaaaaggaatgaggaggaattttgtgtattgatacagggttgtgcttcttagaacttccttcagaaaaaaacttgccattcagctacaaggagtgcacctttactagttcattttggttttcgttcatgggaattttaattatcatctggaggccatttgctttcagcctgaagatattcctttagtatttcttttttctttttctttttcttttctttttttgtttttgagatggagtctcgctctgccatgcaggctggagtgcagtagcacgatcttggctcactgcaacttccgcctcctgggttcaagcgattctcctgcctcagcctcccgagtagcttggactacaggcatgagccaccgcttttttatatatttttagtagagatggggtttcaccatgttagccaggatggtcttgatctcctgatctcgtgatctgcttgccttggcctcccaaagtgctgggattacaggtgtgagccaccgtgcccagcttcttttttgtttttgtttcttccaacagggtttcactttgtcacccaagctggagtacaatggtgtggtcacagctaactgcagcctcaacctcccaggctcaagtgatcctcctgcctcagccttccaagtagctgggactacaggtgtgcaccaccatgcttgtgtagttatttttttatttttattttttgtagagaagaggtctccttatgttgcccaaggtggtctcaaactcctgggtttaagcaatccttccatatcagcttcccaaaatcctgggattagaggcataagccaccacactcagcctggtatttcttataaagcagttctgctagcaacaaattctctcagtttttgtttatctgagaaagtctttattaatcttcatttttgaaagatagctttgctggatataaaattcttggttgacaggttttttttctttgtgcactttaaatatgttatcccactgccttctggctttcattgtttctgctgagaagtcatctcttaatcttgtaagtgatgagtcattttccacttgctatgttcgagatttcctccttgtctttgcctttcagcatttttattatgatgtgcctgtctgtaggtctctttgcatttatcctatttggagtttgttagcttcaggatgtggagattattgtttttcaataaatttggagaaatttcagccataatttcttttcttctgcttctttctccctctcctgatattctcaatacaccaacattcgtgtgcctaaccatgacccacatttttctgaggttttatttatctttcttcattcttttttctctttattctttagattgcataatttctgttgacccagcttcgaatttgctaattatttcttctgttagttaaaataaactgtagggcccctctagtgagtccttctttctttccttccttccttccttccttgaaatgaatagaataacatataaaagaactccaatatgtctggcaggagatttctctgtggaaaacttacagaccaggagagaattgcatgatgtatttaaagtgctgaaggaaaaatgcttttatcctagaatattgtatccaatgaaaatattcaaaaatgaaggagaaataaagatttttccagaaaaacaaaagctgaggaattttgtcaacactgcacctgtcctaaaagaaatgctaaagggaattcttcaatctgaaagaaaaggatgttaacaagcaataacatatcatctgggccaggcatggtggttcacacctgtaatcctaacactttgggaggctgaggtgggaggttgagcccaggagttcgagaccagcctgggcaacatggtgaatccctgtctctacaaaaaatacaaaaattagctgggtgtggtggtgtgcagctgtagtcccagctacttgggaagctgaggcaggagaatcgcttgagcccaggaggcagagcagtgagccgagatagcaccattacactccagcctgggcaatgggagtgaaaccctgtctcaaaaaataaaaaaaaaaaagatatcatctgaaggtaggaaactcactggtaacagtaagtacacagacaaatgcagaatattataacactgaaactgtgttcttaaattcaagacctagaactgttaccgacctcgatccctggtggactgaacaaagagagtgaatgcgggaataaagacaaagacaaataaagacaaagacaaacaagtatgtttggaagaaggggtcgggggcaccttgcttctagtggacaaggacccagactttctacagcccttcgtatttattggtaaaagagatagtgagaagtggggtggcagaaaaggtcaggtgctcggtccacagtgggcttgcaaaactgcattcctcgaacaataggctctagatgtcccagtagataacctcaaggagcccggtgccaggcagtgaccaccctcagcaaaccttctggtggcaggcacagtgtgagtttgcccacatcctgcattcatgataaacagtttgctgtttgatcatatagcctccagtggaatgctgagttggtcatgatacctttggccttttcagctcccaacatagaactagggaaactactaaaagaaaacactgaggacactctccaggacaatgatctggacaaagagttcttgagtaatacccaaaaagtacaggcgaccagagcaaaaatggacaaatgagatcacatcaagttaaaaagtttctggcacagcaaaggaaacaaccaacaaagtgaagaggaacccacagagtgggagaaaatatttgcaaactacccatctgacagaggattaataaccagaatttataaggaactcaacaactctacaggaaaaaatctaatcaattaaaaatgagctaaaagtcttaataggacttctctcaaaagaagacatacagatggtcaagaggtctataaaaaggtggtcaacatcattgatcatcagagaaatgcaaattaaaactacaataagatatcatctaaccccagttcaaattgcttctatcccaaagaaagacaataatgaatgctggcaaggatgtgcagaaagaggaacccttatacactgttggtgggaatgtaaattattaggttgctgcaaaagtaactggtttttgacattgaaagtaatgacggccagacgtggtggctcacgcctgtaatcccagcactttgggaggccgaggcgggtggatcacctgaggtcaggagttcaagaccagcctggccaacacggtgaaaccttgtctctacttagagtacaaaaaaattagctcggtatggtggtacgcacctgtaatcccagctacttgggaggttgaggcaggaaagtcacttgaacccaggaggcagaggttacagtgagccgagattgtgccactgcactccagactgggggacaagagcgagactttgtctcaaaaaaaaaaaaaaaaaaaaaaaagaaagaaagaaaagaaagtaatgacaaaacatcacagaacaggggaaaatcccatttaccctgatgtgattattacccattgtatgcctgtatcaaaatatttcatgtacctcataaatacatatacttaccatggacccataaaaataaaaaaatttaaaaatttaaaaagttataagagaattaggaaatttgaacagtcactgcatatttgatgatattaaggaattattttcttatttttataatataatgatattatggttctattcttaaagtccttatcttttatatatatttacatactacaatgctgaccatcattatattgtgatgagatttttttaaagggtccttaaatgttcatagaggtatttatgaataaaatgatattttgcctggaatttgctaaaaaataatccagggttttgtttttgttgttgttgttgcctttggagagagacggtgatactgtggatggttgtcctctccaaatctcatgttgaaatgtgatccccagtgttggaggtggggcctagagggaggtgtcagatcatgggggtgcatccctcatgaatgtcttagtgccatgcccttggtgatgactgagttctcactctattagttcactggggagctggttacttaaaagaagccttgcccctcctcctcgctgcctcagtatgtgacatgcctgctccctctttaccttgccatgattgtaaacttcctgaggccctcaccagaagcagatgccggcagccactttctgtacagcctgtaaaactgggggccaaaataaacctcttttctttataaattacccagtctcaggtatttttttatagcaatgcaaatggactaatacagaggaattataggtgtaacaagatggatcagatgttgctaactgttgaagtttagtgatgattgtatgtaaaggttcattcataattttctcaacttttatatgtttgaaatttcccatgatagaaaattttttaaatgaacaaacagttctatccactattctctaaaagtgtgataacctctgagaagggagtaggaagctttgatggatgggcagaaataagtcctagccaggtctatggagaatactgctctgggagatccctagctcaggagtcttaaacccctgggctgcaaaccagtaaggtctgtggcctgttaggaactgggccacacagcagaaggtgagcggcaggccagcaagcattattgcctgagctctgcctcctgtcaggtcagctggggcatcagattctcatagacctgtgacccctattgtgaactgcacatgggagggatctgggttgcatgcttcttatgagaatctaactaatgcctgatgatctgagatggaacagtttcatcccaaaactctatgcccaccccctgctcccaaggaaaagttatcttccatgaaactggtacctggtgccaaaaaggttggggactgttgtcctcgctgattgtgatcaagaccaagctgtagaatgctatgtgtcttcttaaggaacttttagctaggcaagtgtcaggagagataagtccaagttccagtgttcaatgctttgttaatttagaccccacttgaccaagtccattttattttttttatttccacattaattcaagtgtcatcatcctacaagattcagctcaaatcctacctcttcctcactcatctcttagctagtgatctccctttttccatatccttttaagtggattgtttcctgactgagtgtaggctccttaaaaccagggaccggcagggcacggtggctcgcgcctgtaatcccagcactttgggacactgaggcgggtggatcgcttgacctcaggagtttcacaccagcctgggcaacacagtgaaaccccatctttacaaaaaaaaaaaaaaaaaaatagctgggtgtggtggcttgcctgtagtgccagctacttgggaggttgtagtcctgtagtcccagctactgatacttgggaggccgaggtgggaggattggttgagtccaggaggaagaggttgcagtgagctgagatcgcgccactgcgctccaacctgggtgatagagtgagaccctgtcacaaacaaacaaacaaacaaaaacccaaaaccagggaccatgacaaatttttaaaatctctcagccccaaaaataatactatccacaaagtcagagctccattaatactggaataaaggttaaaagagcccaataagtagaagtagatgagttaatgatttttaaacaagtggcagtctctctgtcctggtagtttcaagaaacaccactccgattcctattttgaagctgctggattttttttttttttttttttttttttttttaacagagtctcgctctgtcgcccaggctggaatgcagtggtgcgatcttggctcaccgcaacctgcacctcctgggttcaagcgattctcatgcctcagcctcccgagtagctgggactacaggcgtgtgccaccatgaccggctaatttttttttttttttgtatttttagtagagacgaggtttgccatgttggccaggttggtcccgaactcctgagctcaggcaatccgctcgtcttggcctcccaaagtgatgggattacaggtgtgagccacggcgcccggccagctgctggatattttgaccacctcaagtacgctgagcacgaaatcagtgcatctggcagtacacaggagcttgaaatactttttttaaaagttgttattcaaactgaaggagtttttccctgtggtctgtaatcgccacgtgcccgttctgtatacagccagcctgggtttttcaatcccacgtccgctacctaagagaacaccaaggcttggagtgagtatggcacaatcagcttcagatgttaagcaaatattccaacctagagtaggaaaatggaatatggacggggctttatgaaggtgcatggtcaggcaaaggatcttagtggatgaaagacagtaaagattcatcccaaccaaagaccaaaaatgacacatatgtatgagcaaaacatcaggaagaacactcttatgtggaaaatattacacggaaaacaaaagaagagtaactttttcccttttggtttatcccgctctggtcctcagggcgatagctaccacctgacacacagcgacctgggaaagagggaaactcaatcactgccctcgcggcccggggggagcccggaagcgcgcccagagccaggtcccgcgcgggcgccaccgagcgcggacctccctcgcatcctagagcggccgcgcgggacccggccggcggcgcacttccgcccgggcgcattgtagccccgcggacagctgggccagggtgcgggcctgcgcctccctcggctcctggcgcgggcctcggggagagggtgagtgcggtagggcataccagaggggggcgggcgcgcttcctcgggactcgccggctcgaccaggcacggcccggcgctggggacctaagcctggggagcgcccgggagcgaggacgcgcctcgttcaccgccccgggccggagtctcggcgggccggagcctcggccgcccggcgccgccgcccacccagcctttttcgaggccaacacggtctcgtgggggagcctgggctctctggaggccggaaatctggcctctggcctgcctgtgccttggcctcttactctctgccgcccggcctcggttctttcagctctaagatggaggacagcgatatctgccctaggcacaccacagggtgattgcagggttgacactgcctgcctgaaaacgaaggagcgccggttctcaacccggcaaccagtagaatcgcttgggaagcctccaaatgctgatgccccatcatcaccggggaattgtgatctgcggccaggaccgagatccacgggcccagagtgaaatgacagtactgtgatcacgactggaatatgcacttcgccgaacgtggatcacagtcttgagaaagcaagcagctgggtttttgttttgttttttttccaagaagacagggacctaatctggtttgctcgcatttaattcctagtgcctagaatggtgcatgtcccaaaacatgcaccattgattaaataatttctgattacttcccgacctatttggagggttttcattatatttgttttaaaattattatggaaaccttcaagtcatatatgaaaattgaatagtaactgaactcccaattcatgatcaattctgtttcatctgttaccctctcccccactgtagtattttgaagcaaatctgaaatgtaccattccatctgttaccttgttcatgtttataaaacacaataacacctttttaaaacataaagccattatcagtgtacttagcacttcattttaccctctactatccagtcagcatttacattttcctagttgtctctttcctcttacccagtttgtccaaatcagtatccaaacaatctacacacgttatatttggttgatgtctcttagatctctcttaatctttttctcttgctctttattttgttccctgtattttacttgaacaagtcatttgtacggttcacgttttctacaaccaggattttgctttttccatctcggtatcctttaataagcaggtatttagacctgcagacttgttcaggtcaggttcgattttttggcaagagaacttaatgggggattactgtgtttttcacattgtatcataccaggagttagatagcatcttgcctctctttgtggaccttttatgtacaagtagcaccgtagggtaacaattgaccagggaatgccagcaaatacatgcaaaagaaatgagagaatatcaccttttggcaacccctaatgaaataatggatcctggcaatgatcactagcggctgttaacgtcagaaagagagacagctagacaatgcgtgctgcctaatggggtactcccatcagacagcacaccgtttgtcttatcaagtattcttggagtaatgggggtggtgtgtatagatgaaacatgattgcctatgagttaacagttgttgaagttcaatgatgggtgtatggcattgcattatgctaatctctacttctgtatgtgtctgaagtttttcagaataaaactttttttaaaaagattgattagttgagtagtgagtttaggtcaacctgatccatacattgcagttctctgttagcctttcactaagtgattctcaaatcggactccatgttaggatcacaggagaaggctttttattttatttatttactttttaatactaaaacatgtctcacttgcagaatttcctatctaaatgttctgggatggagcccaattattgatagggttttttgttttgtttgggactacaggtgtatgccaccatgcctggctaatttttttatagagacagagtcttgccatgttccccaggctgctcttgaattcctggcctcaagccatcctgccacctcagcctgccaaagtgctgagtttacaagcaggagccaccgtacctgaccttcactgatatgttttaaaagctctccaggtgattctaatatgcccccggggttatgtactactgatctaaatccattatttgttagggatgacaaagtgattatattctattattccttctgcagttaatttgcctttacaaatgttaactttctgcattctgtttattcttacctatcttgcaaatcaataaggaagcctctgcaaataaagctcctttcttagcagaggaagacttgatcttggaggtgataatgtagagtaacacatgaaagggatgttagcaataacctcaacgctatgcttaaggtagagatgcaccaccttatgtatgagggttgggggcaggaaatatggggaggggctgtttcccaaaatggaagggaagactaggtagtgtgtagttagagaagcatgtttggccatatgacacatttccaaaaaaaaaaaaaaatcatcagcattaagtaaatataaatttaaaaaaaataaaatgccactcattgaaacataatgcaataaatttaaaagaaaagttaaccccccgcacagcccccaccccatcactttaattacccctgagataacccatattaacaggatggtgtgtatcctctcccacatcagactttctctgtcttacataaatgtaggggtttggggtattgttataaaaacgagatcataccatagccatctgtaacttttctccttgtcatccctccacaacagtagttacagaagactctattagctgcagaataaatagttgatagactaaataatagcacaaatgtacaataaaatattcagccattttcctattgacatttttagattgctttcatattttagccatcttgagagcaacacaatacacgtcattttacatagctctttattatttgggtagattaccaaaaatgggattactgggtgaaagcatataattatcaacagcatcattattactggtaatatatattccaaattattctccgaaagcctaatcgcaattcataactttgtcaccattagtttgtgacagtagccatttaccgtcatcctggttagcactgactagcattgctctattgatatttgcctgccagctgatgtgtggtaaatggtctctctttttgtttgttgtgagagtgggtcttgttctgtcaagcaggctggagtgcagcagtgaaatcacagctcactgcagccttaaccttccaggttccaatgatcctcctgccttggcctcctgaaaagctgggactataagcacatgcctccatgtccagctgatttttgttttttaatttttttgtagagacagtgtctcactatgttgcctaggctggtctcaaactcctgggctcaagtgatcctcccaccccagcctcccaaaatgctgggattgcaggcatgagctaccatacccagcctctttgttctttattttgcattccactaactacctggagactgaacccttatcttttatttattaacttaaattttttaaatagatacacgatagttgtttgaacccttttcatgcttataggccatttggatttcttctgtgattcatatatatacatatttatgtatatatatgtgtatatatgtatatatatgtatatatgtgtgtgtgtgtgtgtatatatatatatatatatatatatatatatcctttgcctgtttttctgttgcacaagtatttttgtattttgaatgcatttgcataaactttttttttttaggagcattaaccccctgtcataagggggcccaaacttttttttttcaggttttttttcttgtcctttgactttatgagtctcaatatatataaaagattttatttagtgaaaatgtctgtttttaaagtttctggattttatgtcttgccaataagggcttcccatctccacagttaaatgtataaacattctcctaatttttttgaacacgttattggattttttacatttaaatttcttaactacgtgaagtgtatttttatatacaatgcaaagtgagcatctttctttgcttttttctctgctagaatagccaattatgtcagtgccattcattaaagaaaccacactttttacacctttgttatatactgtattgattccgataggtagctggtttatttctgaactttcccttcccttttacctctatttttgtgccaatattattgtttgtatgtatgtatgtatgtatgtatttgttgagacagagtcttactgtgtcacccaggctggagtgcaattgtgcaatcttggctcactatgactgccgcctcccaggttcaagcaattctgctgcctcagcctcctgaagtagctgggactacaggtgtgcgccagcatgcacgactaatttttgtatttttagtagagacagggtttcaccatcttggccaggctgctctcaaactcctgaccttaggtgatccaccctcctcagcctcccaaagtgctgggataacaggcatgagccaccgtgcccggcctattctgttttaattatgtcagattgctgtagtaaatgttaatacctagaaaagcaggtcaccactcactgctttttggaattttctcatcccttctcagacatttatttttccttccatatgatttttggattgtttctgttccaaaataaatcccactggaagtctgatagaatttccaccaaatacatctacattagcttaggaaggatgaacatctctgtgatatcaagtcatcctatcagggacataatgtgtatcttttattcgtgtgaatcttttgggtgctgttcctttcctgctaactttatttctggtaattttgtttttgctcttagaatgggtttttcccccatttctgtttttatcttgttattgctaagactgagaagagttactgaagtttttgtatattttatatctagctgtcagtcaaattctcttacagtagtttttcttaagcttctttgttttcttccctgccatcaatgtggataatctataatcagttatgtataaatttcagttcattctaatatattctgtttgatacatatattccatctcagaagtatatcagtgatgtcagatgtacctagaaatagtgaaaggaatagtgccaggagttggaataaacctgcacattcaacaggttgttgctgatcacttaaaatagcagagtcccaagtcctcgtgagtcatggaccatgtcatgtagggagtgagacatttgttcagcattattgtgaaatatcagcatgactatagagcataatagagcattactgttatgattgttcagagaaagggaaagggctgatcattatgggcatcagagacaccatatggtgagtatcattaaataccatctcttgccctgtatctcaactagagttgttgttgtttagtgtttattagaaggattttttttaaaaaaattagtaagtagaaagtacagagtgttcccatatactctcttatccctcacccctcagtttccccttattaacatcttgcattaatgcggtatatgttcagaagcttaagggctcatgaaaaaaaaatgaaaaatgtgctacatgtgttacagttgttgagccaatattgatacagatacactgtcaactaaagtttacattagagctcattcactctagtggtgtttattctgtgtacagttgaccaatgtataatgacatatgtctgtcttactgtatcatacagaatcgtttcactgccttaaacatcccctgtgctctgcctgttcattcttccttctctcaccctgtatcactagcaagcacgatttttactgtctccatagttttgcctttttgagaacatcatatagttagaattcagctatagtttttaattgcctgggtttggttatttttgtttgtttgggtgtgtgaacaattatacaagatttgttaacttgtagttttagccaagttattaaaaccttactgtggatatgtgtggaatactatgagagaccaagaatccagactgttctaaataaccaaaaagtaataatagagataaatattacaggaatatgtttttggtacagtgatatgaaataatccccagatgatctttctgttgcagggtggaagatgtctatggatgtgacattcctggggacgggtgcagcatacccatctccaacccggggtgcctctgctgtggtccttcggtgtgaaggcgagtgctggctctttgactgtggggagggaacacagacacagcttatgaaaagccaacttaaagcaggttagtgtgccttcagctatctcattaagatttttttgttgttctgcttcattttcttggctctccttggacattttgtttagaaacagccctgatggttgcatcccacttcagtgctacaccctggtgagacttggaaggcctgcaggcatctggccacgtccactgaacttcatttacttatttacttgcttttcatttatcctgtagatgctgaaagcaaggattcatgtaggcttggggtttgggaaatgtcgtgggatacaccaggcatattagatgaacactgccttagcaaggaagcagtgtacatacttacctccaccaggagatagttttcatgagaggatgcaaagggtaggaaatgtttggaggagggagatgttgttttcctcttggggttatcagggtaaacttctcagagaagttgacctgtggattgtcaaaggaggaggaggaatttcagggctgaggagaagaagggcatttcaatcagggggaatggagtgagcagaggccagcacctgggagatagagcagtccagtggtgaaaagcttcagctcagagtcaggcagacctgggttctagtcctggctgtgtcttgggcctgtgaccttagcatatcagcaaacttcaactttactttcccgatcttgaaaatggggataaaaagtctacttagaaagggtgttatgagaattacatgtaatcatttattctctgtgtgattgcctctttctcagttaaatcttagctcagatgccatcttctcagaggctttcccaaatcctcctggattaagtagttcctctctcaccccagtcattcctttactttgtcctatttttattgacttcttagcatcatcagtatctgaaattatgttatttagtttgtttctgtgttctttatctccctatactgtaaagtacgttccatgatcatttatatacctagtagatgcctagttatatctgttcaactaggcatctactaagtatataaatgatcatggaacttactttagtgaatggataagacgtttagcaacttagcacagtgcctctcacttattaggtcttgataaatagtattgaagtcattattcctacaactcttcacagtacctggcacttggtgactaaaggaaagatacttctagtgttcagggatctcttggtccagtgatggaaactgacatgcaaacggacagtaatcaatcatgtaatgtgataagtagaataatggaagtattttctaagtactttggagcacaaaggagggggaagtaactgaccattcattcattaatagaaggcatcccagagattgttaacagttgagctaggatccaagagattcatagaagtttttctgagagagaggtagagatggacattgagggaacagacaacaaagtgagcaacaagtaaggaagtttccaggaaagaactggcatgttggggagcattgagtacttggctaggctagatggaactaagaatgctgaaaaggtgagggctgactgtgaagtcctctgtagcatagtaagatatttagactttattgttctactgggaaaaaggaaccattcatgtttttaagggggaataatgcaatctcgtttgtgttttaggacagagttttctgatggcacatgtattgggagagagagaatagcatcagggagaccagttccaaggcaattgcagttcacttgtatcagttcattttcatactgctatgaagaaatacccaagactgggtaatttattaaaacaacaacaaaaaagaggtttaatggactcgcagttcacatggctggggaggcctcacaatcatggtggaaggcaaaggcagagcaaaggcgtgtcttacgtggtggcaggcaagaaagcatatgcaggggaaccaccctttatcaacccgtcagatctcatgagacttattcactgtcgtgagaacagcatgagagaacctgccccccatgattcaattacttcccactgggtccctcccatgacatgtggggataatgggagctacaattcaagatgagatttgggtgggacatagctaaaccatatcattccacccctgactcctccagaaccttatgtcctcacatttcaaaaccaatcatgccttcccaatagtcccccaaagtcttaactcattttagcattaatttaaaagcccacagtccaaagtctcatctgaaacaaggctagtcccttctacctatgaacctgtaaaatcaaaagcaagttagttacttcttagatacaatgggggtacaggcattgggtaaatatacccattccaaatgagagaaattggccaaaacaaaggggctataggccccacgcaagtccaaaatccaataggacagtcaaatcttaaagctccgaaatgatctcctttgactccatgtctcacatccagggcatgctgatgcaagaggtgggctcccattgtcttgggcagctctactcctgtggctttacagggtatagcccacttcctggctgttttcatgggttggtgttgagtgtctgcagcttttccatgcacacagtgtaagctgtcaatagagctgccattatgggttctggaggacagtagctctcttctcacaactctactaagcagtgtcccagtggctatgtgtgggggctcacaccccatatttcccttccacactgccctagtagaggttctttgtgagggctccacccctgcagaagatttctgcctggacatccagatgtttccatacatcctctgaaatctaggtggaggttcccaaacctcaattcttgacttctgtgcacccgcaggcccaacaccacatctaagctgctaaggcttggggcttgcagtctctgaagcaaccgcctgagctgtaccttggcccctttaagccacactgggatgcagggcaccaagtcccaagactgcacgaagcagcaaggccctgggcccaggccaggaaaccgtttttccctcctaggcctctgggcacgtgatgggaggggctgctgtgaagacctctgacatgctctggcaacattttccccattgtcttggtgattaacatttggctcctcattacttacacaaatttctgcagctagcttgaatttctgctcagaaaataggattttcttttctgttacatcatcaggatgcaaattttctgaacttttatgctctggttccctttaaacataagttacaattccaaaccatatctttgtgaatacataaaagtgaatgcttttaagagcacccaagttacttcttgaatgctttgctgcctagaaatttcttctgccagataccctaaagcatctctctcaagttcaaagttccacagatctctagggcaggggcacaatgctgccagtctctttgctaaagcatagcaagaatccctttgcttcagttcccaataagttcctcatctccatctgagaccacctcagcctggactttttggtcaaaaccattcaacaggaaattccaaactttcccatgtcttcctgtcttctgagccctccaagtctctaggaaattctaaaccttcccatattttcctgtctccttttgagccctccaaactgttccagcctctgcctgctacccagttccaaagtcacttccacattttcaggtatccttatagcattatcccactctaccagtaccaatttactgtatcaggccattttcatactgctatgaagaaatacccaagactgagtaatttatttaaaaaaaaaagaggtttaatgaactaatcgcagttccgcaaggctggggaggccccacaatcatggtggaaggcaaaggcaaaggtatgtcttacatggtggcaggcaagagagcatgtgcaggggaactcccctttatcaaaccatcagacctcgtgagacttattcactgtcacgagaacagcatgagaaaacctgctcccatgattcaattacttcccaccgggtccctcccatgatgtagggattatgggagctacagttcaagatgagatttgggtggggacacaaaccatatcatcactgtgtatatgtgtgtgtgtgtgagagagagagagaatgaggatattgaagtatagagatggagatgagagattcaatttaagagatacttgtagaaataagaggagatggtcactgaatgtctagtgtgtgaggaagtgaagaattaatacaagttactgatggtgatgtcctggacctagagaagaagtcaggaaaagagttgttggaggaaggagctaatgcatattgtttgggacatatggtaggtacaattgaaccgtagttatatactgtcttgtgttgaaactttgagataattcaggtgctattctttgcttttcttggatcgtacagagattcctttcatgagaaccttcatgagagccctctggacaggcacaggccagagtagagacttgacagttaacattttagacagtaggagttgaggtggcaaggtgtactgaaatagaaacaagaaattgttaagtgtgagtaccagaggtttggctgtggggatacatctttttatttaatacttgtgttagttatctgatactatctaataatgcataacagattataaatttagtggcttatttgcatttattatctcctagttactgtaggttagggagttcgggcctggtttagctaggttttctgcttcagggtctcactaggctgcaatctaggtgttggctggggttacaatttcatcagaggcccaactggggaagattctgcttctcagctctttcaggttgttggcagaacccttacagtggtaggacagtccaccctgagctccttgagttctctgcattgtaggtttctgcttcatggtagcttgcttcttcatagccagcatgggagaaggagactctagagtaagtctgctagcaagatggagtcttatgtcccataaagtaatcgcattgcattcttgtgccatattctgctggttagaagcaagtcacaagtcccagccacactcaaggagaggggattgtaggacgtgaacaccaggaggtaggggccacagggatcacctaaagtatccaccacaagtatattttacagttcctttatatatgattttctgttttttgtttttttttgagacagagtcttgctctgtagctcaggctggagtgcagtggtgcgatctcggctcattacaacctctgcctcccaggttgaagtgattcttatgcctcagcctcctgagtagctgagattacaggcacataccatgacacctggctaatttttttttgtatttttaatagagatggggttttgccatgttgcccaggctgatgtcaaactcctgagctcaggcagtccacccgccttgtcctcccaaagtgctaggattcaggtgtgagccactgtgcccagtctatataggatttaaataaacagttggagttgggcacagtggctcatgcatgtaatcccagcattttgggaggtcaaggcaggaagatcacttgaggccaggagtttgagaccaagctgggcaacaaaaagagactccatctttacaagaaataaagccagatgtggtcccagtgggaggctgaggcaggaggatcctttgagcccaggaggtcaaagctgcaatgagccatgattgagccactgcactccagcctggtgacagagcaagaccctgtctcaacaaataaataaataaacataaatgcatgcattcatacatacaattgataaatctaatcttggccaaaaaaacccaaaacaaaataaaagaaaacaaaaaaaacacaaccccaaaagcccaaaggaacctttagtttactacatttctatacgcttagaaaaaaaatttctgaggccaggcatggtggctcatgcctgtaatcccagcactttgggaggccgaggcaggtggatcacgaggtcaggagtttgagaccagcctggccaacatggtgaaaccccatctctactgaaaatacaaaaattagctgggcgtggtggcgggtgcctgtaaacccagctacttgggaggctgaggcaggagaatcgcttgaacccaggaggcggaggttgtggtgagccgagatagtgccactgcactctagcctgggtaacagagtgagactccatctcgaaaaaaaaaaaaaaaaaaagaaaaatttctggccgtagagaggaaggtgagatagtaatcctagagcattacctgtgactctctagtacttcagatgcccctagtctcaaactggaatgcagcaccctcagtacatactaatttctctccataacctattatggacctatcattatttgattcattgaaaccctttgagcttgtactacctctagggataatggatatattacatagtggtgaagtctgggatttaatgtactcatgaccagataatgtacattgtacccatcaggtaactaattatccctcaccacacacccccaccccccgccaccctcctactcttccaagtcttccatgtatattattctacaccctatacttatgtgtacacatgaaatgattattaaaagtattataagagcatgattttttaaatgatataaaaagtataaatgcttattgtaaaaattcaaacaaaagagaaaagtgtaaataagaaaagtccaagtctcccctcataggtgaattttctatgtacatagatatggtgatagtatgggagtgtgtgtgtgtgtatagttctgcatacatagaattatactgctcttggcataacctgcttttttttttcaactgagcaatgtatacaaacaatatattgcagcttttccaaatccagtcaatatacctatgtcttcatttttagagaatgctcaatattccattcctctgtggatgacatattcccccataacttccttgttcccaaggaaaagggaactcaggcatttttgtgtcttcatttgaaagcttcctcatacctttgataattgtggttgccattccttctccctttgaaatcaggtttcttgaaaaatgaagtatttgtctccttgaaactgtgataactgtaggaagcagtttgtcacttaatttgcctcacttcgagttcacaggttgttttggtgttcagtttggctttgttttagagtggatagggaaagggcccagaaagtcagatattggtagtttttaggccactgggggatctggactcagtgactgctatagttcttttttttttttttttttttgagatggagtttcactcttgttgcccaggctggagtgcaatggcgtgatctcggctcaccacaacctccacctcctgggttcaagcgattctcctgcctcagccacctgagtagctgggattacaggcatgtgccatcacacccagctaattttgtatttttagtagagacagggtttctccaagttgatcagactggtctcaaactcccaacctcaggtgatccgtccacctcagcctcccaaagtgttgtgattacaggcatgagccattgcacccggccctattgctgtagtttttttgtctgcagagtcctcaggtcacacatggaggtggcttggcaacccggacagggagacgggggaaatgaggaattcaggcagtaaaaaaacagcaaaaaggagcatatcgaggaaacttctagagtgcctcctggggattcgcaaagtccacaatcagcctgtgccaatctgttgttctctgttgctggctgggcttggatgtagtaattctggaaagacttgcttggagaacacttgatgttatagaacaaatcacattacagtaaactattcctgttcttttatggtatcaataaactgtttctgtacttttatagcatcaaacgtttaaaataggtgggccttgagcaaaggaccagaagcctcttttgcactagaaatgtgttaatttttgttgttacttttgaaatgtcatgtggtgtgtctcagaaaatgctgatgtggcatcctgccatattccagcaataaattcagtttaccattggctaaaccaagttataacctaagccaatatgcactgaaaaagctgttgtgttagttcagactgaaaggaagaatggacccaagtacccttacataatagcttaggggatcggctttcctgcattctgccttctgttgcccaccttccttctcagttcttcatctttttccctctcctacctcccttctccctcctccttttcccctcccttcctcaccgttcttcctttttctccatcttcttccacctcacccagacaagcaggccgtgacttgattggttaatcgctgtccagtatagggagtccttaaaaggcaattttgggttcaggcactggtccagtcagttggagccagtggaacattttgttttcctggaatatatgtttgcttttctcagagggagcagtagggggcaatgtaattgctagatgcttttaatacttgaggcctatctatttaatagttaagtgaattattttggtacacttgtatattttacttggtgttttttttttttttttttttttttttgagacagtttcgctcttgttgcccaggctggagtgcaatggcacaatctcgactcacgcaacctccgcctcctgggttcaagtaattctgctgccttagcctcctgagtagctgggattacaggcatgcgccaccacgaccagctaattttgtatttttgtttagaagagatagggtttctctatgttggtcaggctggtctcgaactcccgacctcaggtgatcctcctgcctcggtctcccaaagtgctgggattacaggcgttgagccaccgtgcctggcctacttgtttttttatgtgacagaaaatgtattaaaatactctgaaagctgtaaaactatgtaatatgaagatgtcttatgaaaaatgttatatcttattgaaaccatctagtggggctaggcaccgtaatcccagcactttgggaggccaaggtgggataattgcttaaggccaggagtttgagaccagcctgggcaacatagcaagacctcatttctacaaaattaaaaaaaaaaaaaaaaaaccaggcatagtggtagggtctgtagtcctagctacttgggaggctgaggcagtaggatcacttgagtccaggaggtcaaggctgcagtgagctatgatcacaccactgcactccagcctggatgacagagcaagacctgtctctttaaaaaaaaaaaactattaaaaacaaacaaacaaaaaaccacctggtgaaataaagcctgtcttcttgtttttggaatcatgtagcaaaatgtaaatgaataagtttatgatgataagtagaacttttaaattcaatttactatttttaatgtaaattgttaggcttgtttcaaatagctttgtatgggtttttagttaatgaaaaatttccaaacgtatttctctatctcaatcaaaagggagaattaccaagatcttcatcacacaccttcatggagaccatttctttggccttcctgggctcctctgcacaatcagcctgcagagtggctccatggtgtccaaacagcctattgaaatctatggccctgtagggcttcgggactttatctggcgaaccatggaactctctcacacggagctggtcttccattatgtggttcatgaactggttcctacagcagatcaatgtcctgcagaagaactaaaagaatttgcgcatgtgaatagagcagacagtcctcccaaagaggaacaaggaagaactatcctgttagactcagaagaaaactcataccttctgtttgatgatgaacaatttgttgtaaaagcatttcgcctctttcacagaattccctcatttgggttttcagtcgtggaaaagaaacgcccaggtaaactcaatgcacagaaacttaaagaccttggtaagtgtttttttgttttttgttttttcccgccttctcatcaatagggctcctgttgactgaagctataagaaatgtcatagtaaggccaggagttgtggctcacgcctgtaatcctagcactttgggaggccgaggtgggaggatcacttgagttcgggagttcaagaccagcctgggcaacatggcgaaaccccatctctactaaaaatacaaaaagtaactgggtgtggtgtcatgtgcctgtagtcccagctacttggggggctgaggcaggaggatcacttgaacctgggaggtcaaggctgcagtaagccaagatagtgttactatactccagcttgggtgacaaagcgaaactctgtctcaaaaaaaaaaaagtgtcatagtaagcttccactcctctatcccaggcctgaaactgacaatttctccacttagtccctttgtccaaagtttgcttattaaggaaaatccatggggccaaaaaatgctatttagagcaaaacccaagtatacatttgaatcctgtcttcatctccctggatccacattcttagtctgtcttcaccttatactatcttggttggcaaggtgatttgggtggtagtggtggtggttttaggtccaggctttattttttcatgtcttccctttgatacgtgtttttgatgacatcttcggtctgagaatttttgccatcgttcttaaccttacaactgcaaccatgtgctttcagagtttacttctgtatctactttgcttactaatttaaccttgattaaattaatttggtattcaaaaccctgtgcctcaaccagttttagatatcagggttcatcgtagttgaaagcaagcatacagaggtgggcttggggcccatctaaggcttcacacctcctctatgctaagcgctaagccagcatgcatgaggggatcttttcagcacctcttgtgaggtagagtccaggtacattatatctccagtgtcactgccttcacaggcatgctgtggcagtgcctgtaaaaagcacagtggcattttgtgtgtgtttgtttttttatttatgtgatctcttcctcaactaaaacaaaatgctagataatgaggaaaagtgacttaggccaaggatatttttattacctgaaagcctgtggaaatactattatatttggaaactttaaacatgatctgtgttggaattggtggtcatactatactagtttgtaagtattgtccatagtgatgatcaggtcttactttaaattaatacgagatttaagcccactttgataaatgtggaactgcccctgtctgccaagaagactaataatgtacaattgcctgaaaaaatgctccttgatcttgtaatacaaacaatcctgctaacaatttttttattaagttactttgtaggtacttgttttgactaggtgttgattatatcttttttttttttttttttttttttgaggcagtctcactctgttgtccaggctggagtgcagtggtgtgatctcagctcgctcactgcaacttctgccccctgggttaaagcaattcttgtgccttggcctcccatatagctgggactacaggtgtgcaccactgcacctgcctcggcctcgcacaatgctaggattacaggcatgagccagtgcacccagcctgactatatcactatttaaatacactctcaaattttacccaaaggtgagcttattaaataaagcactctcaaaaactgttgtttctgtgcacagcagagaatcaagaatgttacagtgactacaataaggtcctagtgatacttaggagactaaaacttgtctgacatgtatgcatgggaaatgtttcaagtactaaggcattgctaatatcaatcaacactgaaattttaaaaatgtataaatccagttttccacaagtagtaaaacatttataacaattatggatgccttttccattagctatttgcaatgctgttaaaatagactcttgaaaagtcataaattccattcctatgatgtaatgttatctgccttcatcattaggtgttccaccaggtcctgcctatgggaagctgaaaaatggaatttctgttgttctggaaaatggggttacaatttctccccaagatgtcttaaaaaagcctattgttggaagaaaaatctgcatattgggtgactgctctggggttgtgggtgatggaggagtaaaactgtgctttgaagcagacctgttgatccacgaagcaaccctggatgatgcccagatggacaaagcaaaggagcatggccacagcacaccacagatggcagcaacatttgcaaagttgtgccgtgcaaagaggctggttctgactcacttcagtcagaggtacaaaccagttgccttggccagagaaggagaaacagatggcattgcagaactaaaaaagcaagctgaatcagtgttagatctccaagaagtgactctagcagaagattttatggtgataagcattccaatcaagaaatgaaaccagtgttcctgagtgcacactgacatgtctgtgaatatgttactgaacctatagtccagtttttttatttcttgttttagtctgaaattatttgggccctaataatcctaaaaagaatggagctgcattgatgaattggctcagtatttaaagggagcaaactttttgataataaatctttttaagagaaaaaaaacccagcatcctttttgaagtccagatttgtcaaaatgatagactattcagttatacatcttattttgtgctactaccacagatagccaatattccatgcagtcctgggcttagcttctgcccagctttattgctgctattggcaaagagcacaggactcagccctcgtggctaaaaatggtattttggcagtttgtattgaatctgtttgtgttattaacagaagagggagaaatgtcatgagacgttggacaggcaggattgatgatagcatgaccatagctttgctggaatactgaatgcagggtttggctaggtgtttattttaacattttattaaactttctatttgggtcttaacccatggttctcagctggggtgacactgctcctctagaagcaggtttgaaattatgggtatgttttcttgtcacagtgactgagtacggtggtggtagtggtggtactactactactggtatttagtcagcagggataagggatgttagctgtcctgcaaagttttggtcagtcatatacaataaagaatcatctcaccccgaaatgcaaattgcaggcccattgagatacacagcaagttagtttatactcttgatgtgaatatagtttaccaaaattagtgacataatgagtggaattactaggtaagtcaaatcctaaagagtgaatgtgttagaattgcagtgtcataccaaataacattcaaaagaaatgagccattaagtgaagcttatgaacctggaggtaaaaaatgcttatctgttaaactgaggtttcattgacgtgtccctattaataaacgttatttgccccacaatgtttcttaaaacatgctccatggaaagctagccttcagtgctgattcactcagaggagctcctcagtcaaatcagtttgggaaacacattattgctgtctgtcctcctaggagtggtgtagtgtccatcaacatactaaaaacagtattgcttcaaatgatcataaaccagtgtttgatgccagaaagacctgatcccagagtcccattctctgatatgtggtagtacctctgtgtggtctggagcaggtaacccactctctgagtttcttcagcttgttcatttcaaaaatgggaaaaacagtaagacctatgtcatagattgttaaacaagacaacatatataaggagcatagcacattgcttgaaggtgttgagaaatcctgcagtacagaggcctgtcagctctgttgaacccctttctcagtcctatttcaccaggtactacctgttaacatctcaggaacctagagagctttacagcacacatatttagaaacactgttgtagtacttactgttcaatttcctctgggttctggggcttctctggccaaattttttgactcctggctagttgtggagactccaaagtagtgatgattggctgggggcagtggctcatgcctgtaatcccagcatttggaggccaaggcaggcggattgcttgagcccaggagttccagaccagcctgcacaacatggtgaaaccccatcattacaaaaaatacaaaacttagccaggcatggtggtgtgcctgtggtccagctactcaggaggccaaggtgggagcctggggcggttgaggctgcagtaagccatgatcatgctattgcactccagcctgagcaacagagcaagaccctctctcaaaaaaaaaaaaaaaaaaaaaagcaaaaaacaatgatcaaaataggtctggttacttaagatatgatcattctgatgcagtctctagaatggtctgtcttactatagactctgcccgcaaaaagtgccaaattttgatcatgcataaagcatgccatggtttctaaattcaattcaaataagcattaattagacatctaatgtacctaaacttgtgcaagaggctaggactctaggactagaatggctcagatgagtatctctaatgcatgaagcccctgaggatagagattattatgtcttagtcactgccacatccttagaaatgtccacctagagctgagtgcagtggtgtgtgcctgtagtgccacctactcaggaggctgaggtgagaggatcacttgagtccaggggttcaagtccatagagacatagcaagactccatcttggccaggggcagtggctcacacctgtaatcccagcacttggggaggccaaggtggatggattgcttgaggtcaggagttcgagaccagcctgggcaacgtggctaaacccccgtctctactaaaattacaaagattagctaggtgtggtggtgcatggtaatgaaactagcccatttcattactgaacttaccggaaagaatttacaccacctctttggtggtgccccattcactgagtactaagtaagtgccagactttattgtgttggtagtacataaatgaatagacaaatggcaaaattccagccctaagcacacagcctagtgaaagagaccagtagataaaaagtaaatctgtagttgcttcacatgttctaatcttgtatcctgggcactcgaattttgctgttcctgagcattacttggtagctgacttgagccatgcccttagaatcaggctctataaatacatatgggctaagcctcagaggccatgggaatgtggaaacgatatgttgggtcaagtgtagagtatcagtccatgatgagaactttttctagaccctcttctgggctagaatttgttttcagtgatagagacattctaagaatttgtggagctagaattaagaaagaagtttatattggacttctcggaacctgtaatctacccaaggatttgactcttaagtggggagggtgaccatattatgtattgtgtcccaaatttatttgattactgaatcctctttttgccaaggaagatcttggaactttagaaatgccattctccatacgttgcaaaattattctatttatgttttttacctgcagaatttattgagctcatgatttccatgtctacacttaatgtattacttcctttgtcctaaactgactcaattgtaaggaatccatacatacctacttattttagattttattttattattattattattattatttgagacagagtctcattctgtattttagattttaaaaaatgcacacttgtggccaggcaccatggttcacctgtaatcccagcactttgggaggccgaggtgggcggatcacttgaggtcaggagtttgagaccagcctggccaacgtggtgaaaccccatctctacaaaaattagctgggcatggtggcgggcacctataatcccagctactcgggaggttgaggcagaagaatcgcttgaacctaggaggcggaggttgtagtgagccgagatcacaccactgcactgcctgggtgaaagagcaagactccgtcgcaagaaaaaagaagtgcatgttctaattctccaaagttgtttacacttgcccagatagaccctaaatcagctctgtttaatactcatgcctcattaatgcacttttaatgaactttgaattataaaagcagcgtatgtttggtagagaatttttttaagatgcaataaaagaagacaattattcgtaattccttcacccacagagagctgttatttctgatccagtggtccccaaactgaggggtgggtgagaattactcagggtgtgtaggtagacagcgatccttaggctctgttttcaaagacttaggctctgttttcaaacgtctggggtaatacccaagaatttgcatttttaataagcccccaaggtgattctgaggtatatgagtggcagaccatattgggagaaaaaaactgtctattctatgcgttttaaaagttttgcgtgtgtttagatattttgtatgtgcttctacctatgttggtatgtgtgtatattatacacatgtacacctgtatatttttacatgtaggctgacctcaactgtttttctcatttagcatattatgaggatttccccacggcattaagtgttctctgaaagcatgaatttaatgattttctattattgcattctatagatacagtatcacttaaccgtttttttatttggaggcagtgagattgttttccgttattataaataatactatcatgaatattcttatgcataaatccttgtatctctgagtatttccttccttagaattgatttctctgagggtgaaaatctgacttctttttggaggttctgggtaggaattgcccactggtttccatgctcttttacactcctagcagcagtgaataggagtggcctgtcttggtattctatctggagatgatacggagtatcatcagctcatgaccttgctaacgcttcttccccaagacattagtcctatgaagattattttcacctcccagtgcaaataactttgttatgtcttgcaagtaggacatattgtgatttccttgaatactcttatgccaacttaaaaatttggtagtttttactttaggggtaaaaatccttactgcttcaaatatgtccatgatagatgtacagtgaaggtacttttttactaacaaaggtataaatttatcgtgaaatgtgctggttctgtccttactgattgatggatttttcaggtaatgaatgagtcagtatttttcttacatgggaagactaaaaaggaagcgctggtaatgctctgaatgttccctcttggcaggataagaatagagcggggaggcgggtaagatcgcaaaattattttcttccttagtaggaagtaaacaatgtctaaaagtgaaaaacaaatagtactctaagcatagtatgtttttaaaaagcagaaggtggggaggagagactaccagatgaatagttaagagtggaagaaggggccagaagggtcaagggggtggggacagatggtcaggggaccgctattttttataagcctaatagtattagcactattttacattttaaaccatttgtgtgtattcatttagtttaaaaattacattaaaacacacacacagataagatgctgctctgagtaatcttaacaattgcgtgtctccccatgggtgctacaggcagttagcagctgctctcaagcctttgtaacattccagtcccattctccatactgcagtctgagtctgtgtgttttgtttttttcaaaatgcacatttgagtctcatgttccccctgcttgaaacttaatggtcatttcttacccaccttcccaatctaatcttcctctacacttctgcagccctagccacgtgggtcttctttcagtcctttgtcagggctttctgttgtcgcaaagcctttgcaaggcctgctccctctgcctggaatgctctttctcctctccccaagttaacccttcctgggccttcagatcacagccctatagccacagcctcagggaaaccttccctggcctccccactaggtagcatattactcttttttttttttttttgagatggagtctcgctctgttgccaggctagagtgcaatggtgcgatctctgctccctgcaacctccgcctcctgggttcaagcgattcttctgcctcagcctccatatagctggtactataggtgtgcactaccacgcccaactaatttttgtatttttggtagagacggggtttcaccatgttggccaagatgttcttgatctcctgaccttgtgatccgcctgcctcagcctcccaaagtgctgggaacacaggcatggtccactgcgcccggccgcatattactcttatagcacctgcatctgaccttcctggtgcttggcacttactattttcattttgcttctgtgagcgatgtttctctttcccattagcattgtaagcttcccaagagcagaactgtgtcttttgtttccctctgtgcctagcttggtgcctggaacatattaggcactcaataaatagtgttgactggttcagttttccccgtcatcctgttattcagttaatatgcagtgctttgttttcctaggaattcttcctgattaatattaaaaacaaacaaaatacccacccctagtctctgaaataaaagtgggaaggaggataatggttgtctgtgactttaatggggtgaatccttttaagtactaattttaaagctttagttttgtgtcatatgatatgcagacagaaacctagacccatgggaatgattggaaaaaagatttactctgcctaaaaagttgggatgttagcttttgcaatgtataggggaatcagaacagagaggagacagccaagccccaggcaggagtctggagccctatgcaggtaggaaaaatgggaaaacttttaagaacacagatatctgatactcaattttatgttgcctgcattgcttggaattaaatctctactttctacctaactttctttgaagtctgctagacacatatgacttggggatccctccccagccctgcacaccaccaaaagagaacaagttctaaattccatgactaggttgacctggggggagaaaggacagcagggaagagagtgagacaatccccaaactaatacagttcacaggagctgaagtcagaggtgattacatgaaccaatgtttcccagttattttcagaaaattgtgaagaggacattgaccttaacatagcccatggaatgagagtgacaggggttgagccaatttcatgtatatcttaaaggacagggtaactccaactgcaatctagacacagatatttctgtgtccttgatatgtttcaagggttaaaaggctgtcatatccagtataacaaggaagttttttggggggaagcagtacctcagtttatccaaagcaaaaaatatttccacccctaaataaagctagctgagaagcactgctgctcagatgtcaggatgctaattatacacccagcagacatcgaaggtacaaagatgaaatgcagccacgaaaaagtaaaaggggaaagacaagggatcaagttgtccagctatataaatctacctttaattgccagaaatcattcaggcagcctcaggtagagaactacacaatgtttagttcactgtcaccaaatgaaaccaaggttatctgggttgttttctacattgttatggcttccagatgtcataggcttgtctgactatatctcttgacacatcctgggctggaaatgaccttgtcactcggccttctaaagtgctgggattacggttgttgacccagacatgggtaccttagaagtacccatgtctgggtcagcaactcaaatgctgatcccaactggcttacaaagggccttcccatggaatacattttcacacagctagcagataacagggcacaatcctccccagcatgcctataccgagaggcagtatagcctagtagagtggccttcaggctaggtaatagtatccctggagatatgtaaagacttttctaaggatacacaggcatattctcatatgaaatatttcgtagagtttatcttcctgagaattattgcaatcaaagtgttttgctgtagtattgtgcattgttccagaatgaaaagcctctgggataccagtgaaagggataattggaatattgatattgaggttgaaaaaaaatgaatgattaacaccttttataagttaggtagtttccaacttgttttgaacaaaactgaaggaggatctaatctgtccaatgatagatttgtttaagcagctttatggagatataattcacatgccataaaatttggtagtttttcatatattcacagagttgtacaaccatcaccactatcaattttagaacattttcagtatcccccaaataaaccccatactcattggcactcacacccactccttcccatctcccaaacctaccatccctaggcaaccactaatctgctgtctctatagatttgcctattttggacatttcagatagatggaatcatacattatgtggtccttcgtgactggcttcttctagtataatgttttcaagatgtatccatgttgtatcaatcctttattcctttttatgaccaaataatattccattctatggatataccacattttatccattcatcagttgatccaataatagattatgaaaaatattgtctacaaaacacctgtatcagaaatgaaaaatgagatattcctacagatcttatgtttgtaagatattgctacagatcttacattagaaagataaaaaaggatattataaataactccaaagttactgaaacaacttccttaaaaaaaaaaattgccagaactgacacagaaagtaaataggactaacaagactttctatttattaaagaaattgaatttgtgataaaaaagaaaccttcttacaaaaaaaaaatcttgagggccagattagtgaatcattttaaacaattgaggaagaaatacacctttcttctccaaacacttctggaaagtagaaaaagagggaacactttccaactcattttatgagtttagcataaccttgatgccaaaatgtaaggacattaaaagaaaggaaaattacatgctagtctctatcataaaaaccctgaagaaaataattagctaattgaatccagtgaaatatgaaaggaataagacctcttcataaaaggagtttattccaggaatgcaagattcatttaacatttgaaaatcagtgttttccacttaataaaataaatgaggaaaaactgtgggacaatctccacagatacaaaacattttttgataaaatttaatagtcatttgtagtaagaactcttagcttattaagataagagataaaagccaggcgtggtggctcacgcttgtaatcccagtgctttgggaggctgaggagggcagatcacttgaggtcaggagtttgagaccagcctgaccaacatggagaaaccccatctctactaaaaaaatataaaattagctgggcgtggtggagcatgcttctaatcccagctactggggaggctgaggtaggagaatcacttgaacctgggaggcggaggttgcggtgagccgagatcacgccattgtactccagcctgggcaagaagagtgaaactccatctcaaaaaaaaaaaaaaaaaaaaaagaatgagataaaacagcaactcaaagtactgttaaaagaaaaaaaaaaaaagggataggagagacccttaatgtgcaccaccacacccagctaatttttaaaactttgtatagagatggggtctctccatgttgcccaggctggtcttgaactcctgggctcaagagatcctcccacctcagccttccaaagtgctgggattacaggcattagccactgtgcctggtcatgtactatattgctttgaaggtcttagccagaccaatatagatagatagatagatagatagatagatagatagatagatagacagaatgaagattggaatggaagaaataaaactttcatcattagcaggtgacatgattatgtacatagaaaattttaaagaataagcaaataacctgttaggataaatagatgaatttaataagattgctgaatactcagtcaatataaagaaaatcaactttatgcctacattccaacaacaaactaatagaaaatgttttaatgatatcatttacagaaggatcaaaactatcaaaaatctaggaataaatctaatgaaatatatgcaaaacctctccactgaaaactacaaaatattattcagatgaagaaaagtaaaataaatggaaaggcataccatgttaataaaccaagaatattcagtattggaaagatgtcatttatccctaaatttatctgtagtttcaatgcaacccaatcaaaataactgtaggtttttatttggatatgtttatgaagaaattgagaaactgtttctaaagtttatataggcatgcaaagaccaagaatagctaggacaatcttaaaagaagaacaaaattaaaagatttacattatcggatatcaagacttacagtaaaactgcaatcacttagtataatattgttgcaaggaggacaaatagaccaatggaatagaaagacgttcaggggaaaaaaacccacacatatttagtcacttatgacaaatatgaaatttctgtgcaacaaagaaagagttgcctttgcaataaatggagagtcaatcagatttcaataatgaaaaaattgattacattgattcctaccttaaacaatacacaaaaatcaattccaaatggattttatatataaatgtgaatttagaattttagtatatgtgctgccgaggcaagcactaaatgtgaatatagaaaagctccctttttggagtaggcaaagattactaaaacaaaatcgaagcactaagaataataaagaaaaaggtagttaaattgaatgttaaaattaggaacttctattcataaaagacactatcaagagagtgataaagcaagccacagagtagtacagcatatttacaatagctgtagttgataaaggatttgaatctagaattcaatagtagttaggtgttgctacataacaaattacccccaaaacagtgatctcataatcttggtgggtcaggaatctcggtacaacttagctgggtacttctggcacaagatctctcatgaggttgtagttaagctgccagctatagggcagtgggttcatctgaagacccaagcgagggatccactttcaagcttcctcatgtagttgtaggcagaccttggtcccttgtcacatgggtctcttcgcagggctgcctcatgacatggcagctgatttccctcatgtcaagcaacctgagatagaatgagcacccaagccacagtctttttataatttaaccttgaaagtgacatctcattacttctgccacattctattcattagaagcgaatcagtaaatccagtgcacactcaagggtaagggactgcagatagcataaataccaggaagcagggtaattggtgggccatcagaggcagcctaccaaagaatttataaagaacttttaaaagtcttgatctaggtaggagttaatatgggtgtgtttactgtgtgaaaattaatctattcagatgtgatttgggtgcttttctgaacataggttatatatctgtggaaagttgacttaacatttttgatgaaaaactctaggcagaattcttaagattcttatctcctggttattaattaaagctctaatctaggcattactatgagtggattttgcagatataattgaagtcccagttgactgtaaaactatccaagtgagcataactcaatcggggagccctttaaaagcagataatttttcatctataattccagtgctttgggaggccaaggcaggaggattgcttgaggccagaagttcgagaccagcatggccaaaatagtgagaccctgtctctattaaaaaaaaaaaaaaagattaaatgatttaacatatgtaaagcacttagaacagaaagtgctatatacagatcagacattatcactattaaacttcaaattggagcctacgatgttccctcatcattcagaggaggtttaactcctttggggttttggaaactgccctcacagtgttccaccagcccagaggctgggtaaggagtgcctccaaccttctagattgggggccagggcacattgcttttgacttgtgttaaagccacttgccacatgttgctatcggacacttgaaatgtggctagtccaaattaagatgtgctgtaagtggaaaaaagtcactagattttaaagacagtatgaaaagaagaatgtataataatagttcaatcattttttacattgattataggttgaaataatattttggacatatcaggttaaataaaagacatgactaaaattaatttcacctgtcccttttttgcagtttctaatgtgggtactagaaaatttaaaattacctatgtggctcacattatatttcaactggacagtgctgctttagacagtctttctcaatgccagcagtcagagtggtcctttaaagatacaattcagatcatgtcactactctgcttaaaaccctccagtaatatcggatctcactcaagagtaagtcaaaatccagatcgaagtctaccagttcctgtgtgatcagcctccaccccaccccctctctcaggttcagtgtaaatcaagttccaaattttgcgaaacctgaagtttacatcatgggagaaagaaagggggagatgaacatgagttcttgctaagaaaaagtacaaattatgaatttatttatttatttagagataagagtctcgctctgtccccctggcgggagtgcagtggcgtgatcttggctcactgcagcctctgcctcctgggttcaagcgattctcctgcctcagcctcccgagtagctgggattacaggctgggtaatttttgtattgttagtggagacgaggtttcaccatgttggtcaggctggtcttgaactcctgacctcaggtgatccacctgcgttggcctcccaaggtgttgggattacaggcatgagtcaccatgcccagccgaataatgagtttagaattaggtactgtgatggttagtactaggtgtccacttgaatggactgagggatgcctggatgtctggggaagcattgttcctggatatgtctgtgaaggtgttgccagaggaggttgacatttgagtccctggactgggagaggaagacccaccctcagtgtgggtgggcaccatccaatcaactgccagagtggctggaacaaagctggcagaaaaggggaagaaacaacttcctgggtcctctccggtgctctcttttcctctgcaggatgcttgcttcctctcctcctgcccttggacatcagactccaggttcttcagcctttggactctgggacctgcaccggcagcctcctggaggctctcgggccgtaggcctcagcctgagggctgcactgtcggctttcctggttttgaagctttcaaacttggaccgagccacgctcccggcttctgtttctccagcttgcagacagccagtcatgggacttcgctttataatcctgtgagccaattcttcctgataaactcctttatatatacacacatatatcctattggttctgtccctgtggagaacctaatacaggttttggtatcaggagtggttctagaggaacataattttaagcataaatttcctttgtcggttttggggtttctggagttggatatctaatctgattagacccaaatgctaaagactctatttctaatagtatggacagcactaatagtccttggcttgaactgtttagagttacgcaaaataaatgcatttgatatttctgattccctgttcctaagaggcaaggagtttagtgactctatatatgatacctttgaacatttgtggagaaccaaggaatataatgaagttggctggttgctcctaagttcactgggcaaagtgatgaacgaaaaggatgagctgagggattctatttcctggttctagatacacatacatagccaaaaagtttctcagggtgccctgggtaagaatcttctcttctgtggacaaagagctgaaattgctgaaaatcagacacaagctcttatgcaagtggctgacctgcaatggaaggttcatgctcagcttcaccaagtgtctactgtcaaagggagggctttgattgggaaagaatgggaccctgtaagttgggatgggaatatgggggactctgatgaagctagggacacctaactcctaaattctaatgagccttttttgccagaggaaatggcatccccaccccccgtagtggcaacatacttttacccacacactccagtaccagcctttccatctttaagattaaccctgcattgccccggggaaacagggatgtcctcccttgaggcagctgccaggaaagacaatgctggttctcctcaggacccatccccaccacctgtccttgcctctggactctaactggactctagttcctacaggcccttagaggtgaggttcagggtatgactcatgagaaggcatgctatgctccaaatactaatcagactttttgggggctactggatgctggctccaactactcgagttttctaatttacatgagcagaaatccagggaacaggtatgggaatggatattaagagtgtgggataatgcagccaatatcatactgaatgggcaaaaactggaagcattccctttgaaaactggcacaagacagggatgccctctctcaccactcctattcaacatagtgttggaagttctggccatggcactcaggcaggagaaagcaataaagggtattcaattaggaaaagaggaagtcaaattgtccctgtttccaaatgacatggttgtatatttagaaaacccagtcatctcagcccaaaatctccttaagctgataagcaacttcagcaaagtctcaggatacaaaatcaatgtgcaaaaatcacaagcattcctatacaccaataacagacaaacagagagccaaatcatgagtgaactcccattcacaattacttcaaaggaataaaatacctaggaatccaacttacaagtgatgtgaaggacccttcaaggagaattacaaaccactgctgaacgaaataaaagaggacacaaacaaatggaagaacattccatgctcatggataggaagaatcaatatcgtgaaaatggccatactgcccaaggtaatttatagattcaatgccatccccatcaagctacccatgactttctccacagaattggaaaaaactactttaaagttcatatggaaccaaaaaagagcctgcattgccaagacaatcctaagcaaaaagaacaaagctggaggcatcatgccacctgacttcaaactatactgcaagactacagtaaccaaaacagcatggtactggtaccaaaacagagatatagaccaatggaacagaacagagccctcagaaataataccacacatctacaactatctgatctttgacacatctgacaaaaacaagaaatggagaaaggattccctatttaataaatgatgctgggaaaactggctagccatatgtagaaagctgaaactggatcccttccttacaccttatacaaaaattaattcaagctggattaaagaattaaattttagacttaaaatcataaaaaccctagaagaaaacctaggcaataccattcaggacataggcatgggcaaggacttcatgactaaaacaccaaaagcaatggcaacaaaagccaaaattgacaaatgggatctaattaaactaaagagcttctgcacagcaaaagaaactaccatcagagtgaacaggcaacctacagaatgggagaacatttttgaaatctacccatctgacaaagggctaatatccagaatctacaaagaacttaaacaaatttacaagaaaaaaatcaaacaaccccatggaaaagtgggcgaaggacatgaacagacacttctgaaaagaagacatttatgcagccaacagacacatgaaaaaatgctcatcatcactggccatcagagaaatgcaagtcaaaaccacaatgagataccatctcacaccagttagaatggtgatcattaaaaagtcaggaaacaacaggtgctggagaggatgtggagaaacaggaacacttttacactgttggtgggactataaactagttcaaccattgtggaagacagtgtggcgattcctcaaggatctagaactagaaataccatttaacccagccatcccattactgggtatatacccaaaggattataaatcatgctgctataaagacacatgcacatgtatgtttattgcagcactattcacaatagcaaagacttggaaccaacccaaatgtccatcaatgatagactggataaagaaaatatggcacatatacactatggaatactatgcagccataaaaaaggatgagttcatgtcctttgtagagacatggatgaagctggaaatcatcattctgagcaaaccatcgcaaggacagaaaaccaaacaccatgtattctcactcataggtgggaattgaacaatgagaacacttggacacaggatggggaacatcacacactggggcctgtcatggggtgaggggaggcgggagggatagcattaggagatatacctaatgtaaatgatgagttaatgggtgcagcacaccaacatgacacatgtatgcatatgtaacaaaactgcatgttgtgcacatgtaccctagaacttaaagtataaaaaaaaaagagtgtgggataatggaggaaggaccataaagttggatcaggctgaactcattcctatgggtccactaaacagagattctgcatttaatgttgcagctcagggagttaaaaaagggttctaatagtttatttgcttggttagctgaaacatggatcgaaagatggcccactgtgagtgagctggaaatgcctgatctcccttggtttaatgtagaggaaggatcccaaggcttagagagattggaatgttagagtggatttggatttgtcagtaaggacctactcatcccaactgggagggtccagaagacacacctttcaccagttccttgtgaaatagatttgtgaagggagcaccagcatccttgaagagctctttgattgctcttctctgtatgtcagatcttacagtgggaaccacagccactcaactggaaaacttaaatgcaatgggaataattggatcctgaggtggcagaggccaagtggcagcactcaaccatcaaaggcaaggtgggcatggttagtaatggacagcagaagcaaaacagcaatcagaatagtctgaaacctatagagctctagcattggctaatttatcattgtattcctagaagtgaaatcgacaggaagcctactacattcttacttgatctgtataagcagaaaacttccaggtcaggtgaacaaaagtccaatttgaattataaaaacagagaatcatggtccttcaatcaatttccagactcaagctagtttatagacccagaaccccttgaatgaaagggaggccaggtccacttgaggaaggaccccactatactgctgaaaatttatactgttaatctttctcctaaccttcctcaaggaaacctctggccttttagcagggtaactgtgctctgaagaaataaataatcagggttttggggggctactggatactggttctgaactgtcattgattttaggggagccaaaatatcactgtggggctgggcatggtggctcacacttgtaatcccagtactttgggaggccgaggtaggcggatcacttgagttcaggagatcaagacctgcctgaccaaaatggtgaaaccccatctctactaaaaacacaaaaaattagctgggcctagtggcatgcacctgtagttccagctacttgggagggtgaggcaggagaatcacttgaatccgggaggtggaggttgcagtcagctgagattgtaccactgcactccagcctgggcgacaaacaagattccatctcaaaaaaaaaaaaaaaaaaatcattgtggccctccaattagactaggggcttataggtgtcagataattgatggagttttatctcaggtctgacttatagcgagtccagtgagtccctggatccatcctgtggtcatttctccagtgctagaatgcgtaattggaatagatattcttagtagctggcagaattcccaaattggttccctggcctgtgggatgagggctattacagtgggaaaggccaaatggaagccattaagaatgcctctacctaggaaaatagttaattaaggacttgaaacacggagggtggtgattcccaccacatccccattcaggtctcctatttggcctgtgcagaagatgtggatcttggagaatgacagtggattatcattagcttaaccaagtggcgactccaattgcagctgttatagtaaatgtggtttcattgcttgagcaaattaacacatcctctggtgcctggtatgcaactattgatctggcaaatgcccttttctccattgctgcccataaggcccaccagaagcaatttgccttcactgtcctacctcaggggtatattgacattccagctgtatgtcataatcttgttcacagaggccttgattgcttttcccttctacaagatatcacaccagttcattatattgctgacattatgctgattggacctagtgagtgagaagtagcaaccactctggccttatttggtgatacatttgcatatcgggggtgagaaataaatctgactaaaattcaggggccttctgcctcagtgaaatttctaggactccagtggtgtggggcctgttgagatattccttctaaggtgaaggataaattgttgcatctcgcctctcctacaactatgaaagaggtgcaacaacctagtgagcttatttgtattttcaaggcaacacattcctcatttgggcgtgttactctggcccatttattgagtgacacaaaaggctgctagttttgagtggaactactacctaatgataggccgattacattgaactacttccatcgtggaaggggcagcagtttatccttgggacagacagttatttccgatatggatttgactttcctgcatgcaattcttctaccaagactgccatctttgggctcacagaatgccttatccactgccatggtattccacacagcattgcttctgatgaaggaactcacttcccagccaaagaattgcagcagtgggctcatgctcatggaattcactggtcttaccgtattccctatcatcctgaagcagctggcttgatagaatggcggaatggccttttgaagttgcagttacaatgccaactaggtgacaatactttataggactgaagtcttctccagaaggctgtatatgctctgaatcagtgtctagtatatggtactgtttctcccatagccaggattcacagatccaggaatcaaggagtggaagtggaagtggcaccactcaccatcacccctagtgacccactagcaaaatgtttgcttcttgttccagtgacattatgttctgctgcctagagttcttagttccagagggagaaatgctgccaccaggagacataatacaaaagtggcttgaggagctactttaggcaactcaagcttcggagtcaacaggttaggaagtgagttacagtgttgcctggggcgatttacccagactgtcaagatgaaatcagactactactccacaatggaggaaaggaagaatgtctgcagtttaggagatcctttaggatgtctcttagtatcaccctgccctgtaattaaggtcaatgggaaactacagcaactcaatccaggcaggactacaaatggcctagacttcagaaatgaaggtttgggtcacgccactaggtaaaaaagccacaaccagctgaggtgcttccagatagcaaagggaatacagaatgggtagtagaagaaggtagttatggttagggaaaagctgccccagggaccaccgcccccccccgccacccccccccccccgcccgccctgcaatgcagctgacccttaccctgaatactctgcagctgcattcctaaacccttatctaggcgccacagcaaggtcaccagacttgctgagcaaaccctgattatagccccccgggcggcactggagaggtcaggagaaacctaggttacaccctcttgtaaattcctattttcacaagataatatactgtaagccggtcaagagatgatatgtggtaaagttaactgacaaacaatcccagagtctctctcccccatagaaacccctcattttgtaagctcagggctgcctcctgactgtggtggaacagcccggcaggttaataaacttccttgcctgaccttgggtctctctctctctctctcgtcctttctttcggctaactttacagttatcaataccagctgccactacatgacccatttcagaaacgaggactgtaattgtcatgagtattctctccttattttgttaataatacatttgtgcatatatacacttgtattaagcagatatctttgtcttttcttgttcctttatgatgtaacataagatttactgacgtcacatcagcatttaagtgttgttaattttatgtaatagtatttaagttaaggattagtgcattttcaattgtacaaaggatagttacattatgttgggtggaattatgaccttgttattgtctttatttggagataagtatgatttaagaaggtgtgtgtgagtgccaagttgacaaggggtggacttgttatggttaatagagatgtcaacctgattgaattgagggatgcctacatgactggggaagcattgtttctggttgtgtctgtgaaggtgttgccagaggagattgacatttcagttgttggactgggactcagtgtgggtgggcaccatccaatcagctgccaacagaggctggaacgaagcaggcagaagaagggggacaaagcagcttgctgagtctccttgctctctctcttcatgtgctggatgcttgcttactctcctcctatccttggacatcagactccaggttcttcagcctttgaagtctgggaaccccaccagtggctcctgggggctcttgggccttcagcctcagactaagggctgcattattggcttccctgcttttgaggcttttggacttggactgagccacactcccagcttctgtctttttccagcttgcagatggcttattgtgggacctccccttgctatcatgtgagccaattctccctgataaactcgcttttatatatacacatatcctattggctctatccctctggagaactcctaatacaggttcagaattgaatgtgaatttagattgagaaaataaatcacaacaatttattggattcttggaaattctggtccctttcttctgatctctctttaggcaaattatcacacatgcttacacagaatacctccagattgcagcctggctcccctgaccccatctagaattctccacaaccccaacaacagctgcccaggctcagggaagccttgaagctctgacctcactgcctttgacctcccctctctttctgcctccttactactcttgtttgtaccatgccagtgcccactgtacagcttttccacttgctccttcctgtgcttgaaatgttccatccccagctgtccacagagctcaccttctcatcttcaggtgtctgctcaaatgtcacctcatcaaagcaacctaccctgttctctctgtaaaaagcagcaacccccttctgcactttctattctctttaccgtgctttaattactctcataacactaccagctgacatattctgtgtttgcacatttgtttgttaattgccagtctccctcctttagaatggaaattcaggaggatagggaccgttttgtctcctgtaagtatacctggcacctaaaactaggcctggcccttgataagacacttaaaaactattggttgaatgaatgaatataagttgaataacaaggaagccttattatttttcaatatggaatcaactttttaaggaaataattcactccacattcccagcccatatcctcaattatcagttacctcagttacctactggtgtgtgacagctactattttggctacctggcatgcttccacatcattcttaccctaatcccacactccacttatccccagggataagcacacactctaggtatggccaagtggtgtgctccagatgattagtcagaaatgagctcaccacctaagcttggccaatccatgacttcctcaagatcattctcactggagttagggaagaggaagtagccccttgacatgtgtcacattattgagctagaaggctgtgaattaagggctctgagggatgtgtttttccctagcagagaaagagatggcttgaaagtcccagcagcatggagccctgggtccagtttctggagctcctctgcttcctgcagctcttcctgcagttccaggatgctggaacctaggagtttcccagcatccttccaacttccttttctgctttaacaaataccagctgagctcctgttactcatgattaaaactcctcactaatatgcaccgggcaccaggctgttcactgaggatgtagtgatgacctggacactatccttgccctcaaggaacttacaaccttcacggagaaagcagaagggaagatggtaatggcaatgcagtctgaacacatgtattggacacgggacttgccggaattcagagatctgacatgtgtcatgacactgatcagctgctttaagttcttgtgataattctaggttcaaagcaacctaaggctctaaaataatattgttggtcatcaaatcaatatatatattaactgagcacctactgtatgcaagggttaccataagtgctatgatacagacctgtagaacattctaactggggtaggttgcccttctaaaaaataataaatactaggtaagtatgaaatgaagtcataggacattctatttcttcctgtgtctttctttttttaattctttttttttttttgagatggggtcttgctctatcaccccagctggtgtgcagaggcatggtcatagcacattgcagcctccaactcctggactcaagcgatcctcctgcctcagcctctcaagtagctgagactacaggtgtgcaccaccatgcccagctaatttttttaagtagtgatgaggtcttgctatgttgcccaggctggtgttgaaatcctgggctccagccatcctcccacctcagcctcccaaaatgctgggattacagacatgagtgagtcactgtgcctggccctatctgtggctttctaaaggagcagtttagcatatggttgggagtgtgagctttggaatcccaattgtgttactagccaggtgatcttgggcaaagtcactttatctctgtgagactcagtgtcttcctgtagactggataatataactatttattttacagggttgttaggaagattaaatgagtccatttgagtaaagcagttagaatagtgcccaacacatagtaaatcctcaataaatgttagctaacaacactatgtctaaatcatataaattataaattcctcaaaagcaggagccttgcattatttgtagctctgctaacacgtacagaccactcaagatttttctagttgctcagctcagcagtattaatatattagcagatgtagcattgtcttgcttgctggtttctccatctgctctaaatttagtactaaataaagatagttgtgggggtggaggaggttttaaagatctctggtccaaatccattaggttttttgttgtgtttgaaagctgtaatccagagagagtttgaaagcatatgctaaagaccatttttaggcatgttttgcagaaatgtatagcatctatttacattattatgtgtttccatactttgactgtcaatcctttgcatatagtagtatcctaactgatgttccaaatttgctactatgctatacatgggcttgcataattcctaattcataacatatggatattaaatagattagcttatgagaagcaattcacttttttccatcttggtaagtagaatagtcacaatccaataaagataaataaagatgtctaggactaaggcatcataattacaccttatatttgtatagtgcaaaataacaccttacatttgtatacgttatttaattcttacaactactcagtgaagtaagcaggcatggaagtatcatgaattccattttatagatgaagatattagaacctagaggttttaactgacttgcctaagtttactacatggtaacaaatggcagagccaagatcatacttgggtttcttcactgctagcccagtgccctttttactttactggtagaggaaagtgttaggaatttttattttcttccaccaatatttacagcctgactctacaaagaaccttaccaatggtggtctgttgtgagccttcagcaaggtatgggtctcatatgcttaatcccaatttgtaaatgttatagagccacccccctggcaaggaggatttatatcaggcaaatgttgcagaaaacgatatttagctgcatctgctacagctgataaactttggaattgaaagacaagaaagaatcatcaatgaagtaactcaaataatgggagagaatctcccagtcaacactgaatatccttgctccttaaatttcaagctaaagatgcctataaaactccatataatataaccacagaagatattttgtaggtagtactttgcacaaaagcaatcataggagttttacagtttgtttttattggaagagagccacagctccagaatttcttgtcattgaatagatgggagggagcgggagttagaagcagaaaagagaatcagcctgaacatacagatgctggggactatgcggttggggcagaaaacgtttatactgtaaggagttagtgtgagtggtggagagagagtgactaaaatttttacacaattactatataaattctttttttttagtatatacattctgatcagactagtgtaaactggcatagacaaatatgaagcagttgatgttgtacatagaaatgggagaaaagaaagccagacaatgtaaaaaatttattcccctcccactccagataacaccccagtgtgagagttaggagtccatatatttcaagagactgaaaccaattcaatgagcttgaaaaataataagatgtattgattctcataggtcaaaaaaacagggatggtaccagcatcaaatgcaattggatctgaggctcaaaggagagtagggttttccctctctctccttctggatttctactccgttttcttgtttattatcttctttcctactgcaaatgaccttcctcgatgtagtcagagaagttgactgccagcagtggcaggccaatactccatgctggggtaccactgtcaaaccaaatcccagcacaaagaaagaaaatgtttctctgatggcttccatgtatgatgtcttagagaaggattgtgattggtcagtgtgggccacatgtctgcccgtgaaccagtctcaagctctagggcaatggagtgccaggactggccaatccttggttatgtctccacacttgtagccaaagcagatgaagtctgtcaccagaaaagtggtaaagaattcggctgagctatcccagttcactacagcaacagttcccaaattgacctgaagataaacatcccctggacccttgttaaaaaacaattatttggctcccagcttagacctccataataagaatttatataggagaaggatggtaatttgtatatttagcaagtaccgcaggtgtattagtttcctattgccactgtaacaaattaccacaaattcagtggcttaaaacaacatggatttattatggtcctggaggtcagaaacccaaaattggtttcactaggctaaagtcaaggtgttgacaggaggtttcttctggaggctctgaggggagaatccatttctttgcctttttcagcttctggtggctggctgtgtcctggtccaccatctttgaagagcatcactccagttactgcttctataatcacatcaccttctcctcaaactttgactccttctgtgctccttttataagaaccactggacattgggtccacttggataatccagcattatctccaagttcaagatcctaactcagtcacatctgcaaactcccttttgccatatgctatatggttgggacgtgtccctcaaatttcatgtgttgaaaactaaatccccaaattcatatcttgatgctatttggaggcagagatttggggaggtaattagtactagatgacgtcatcaggatggggctcctatgatgggactggtggctttataagaggaagagagacttgagtttgcatgcctgtggtcttttgccatgtgatgcccttcaccatgaaaaccctcatcagaagttgagcagatgccagtgccgtgctcttggactttccagactccagaagtgtgagaaataaatttcttttatttataaattacccagcctcaggtattctgttatagcaacagaaaacagtcaaaaacactattcaaggtaacattcacatgttccaaggtttattaggacatggacatagtggggccattatttagcctactgcaccaggtagttatttttttttgagacagagttttgctcttgttgcccaggctggagtgcagtggcgcaatcttggctcaccacaacctctgcctcctgggttcaagtgattctcctgcctcagccttccgagtagctgggattacaggcatgtgccaccatgcctggctggttttgtatttttagtagagatggggtttctccatgttggtcaggctggtctcgaactcccgacctcaggtgatccacccacctcggcctcccaaagtgctgggattacaggcgttagccactgcgcccggcctgcaccaggtaattattatcaggtaaatttgagaaacactgataaaggagttaaaaagaaattacttaggcagattgtgaaggtaagaaagtccttggtaaggtttttcttttaatgaaaagcagcccccaaatcatttcttttctaacaaagagcagcctgtaaaatcgagctgcaggcatagacaagcaagctggaagcttgcatgggtgaatgctggcagttgtgccaataggaaaaggctacctgggactaggcatgattaaaatggtagctccatatttccttctctttgctagccatgtgtacagtaagaagcagacaagatggcactggccaagtggacagcccatttgcataataagattggggtggggcaaccagccgtctccttgtgccatgtgaacatcacacctggtcgaaccaatctgtggggccttcataaatcagacaccacctcttcaagcctgcctataaaatctgctgcagtctgctgcaggccagcttttccccttcagacaatgcctctctctctcacaaaagagagctgctctcctttctctttgttttggctattaaacctctgcttccaaattcactccttgtgtgtccgtgtccttaatcttctcagcacgagacaatgaaccccaggtgtttaccccagacagtgatgctgcttcagcaccacaggaatggttagttaacaccacaagtgcaacataaatattccaaactataaatattatataagcataactaatcacttaactgcatataatatatagatgccccaattgggtggcccaaccaccatgtttttgaatgtgtcagtaactcatttcatttttattgttgagtagtgtttcattgctatggttttgaatgtctccccaaaactcatgttgaaatttaattgtcattgtgatggcattaagaggtaatgttatgttgaagcacaaaggccatcaccagatgctgctgctatactcttagtctccccagcatccagaaccgtgaaccaaataaatttctattgtttataaagtgcccagtctcaggtattccgctatagcaacgcagaatggactaaaacatccactgaatgaatttaccacaatctgttcatccattcacctatgaatggacatttggattgtttccagttttttccgggccaggtgtggtggctcacacctgtaatcccagcactgtgggaggctgaggcaggtggatcacttgaggtcaggagtttgagaccagcctggacaacatggtgaaaccccatctctactaaaaatacaaaaaattagctggatgtgctcacttgaacccaggaggcagaggctgcaataagccaagatcgtgccactgtactccagcctgggtgatagagcctctgtctcaccaaaaaaaaaaaaaaaaagaatatttatggagcctcttccacatgtattttctctcccatctcacctcctacttcactcctctcttatcctgccctaactgtgttgaccttacttctgtcatgtgaatacactgagcttagttctgcttcaggatcttaacatcagctctctccagatttttgcatagctctctccatcattcaggtccctactcaaatgtcaccctctcagagaacctctcctgattgccctatctaaaatagtactccacctcctcccccaatctaattctctatggtcttttttttttttaataaaattgcaattatcactttaatattatattatctgtttggccacatgttaatcatatgtatcacccactagaatgtaagtttgtttttttttcatttctaacttttaagttcctgggtacatgcgcagcatgtggaggtttgttacataggtaaacatgtgccatggtgatttgctgcacagatcatcccgtcacccaggtattaagcccagcatccattagctgttcttcctgatcctctccctcctctcatcccgtctcatctgacaggccccagtgcgtgtggttccatgtatccatgtgttctcatcatttatctcccacttataagtgagaacatgcagtatttaattttctgttcctgcatctgtttgctaaggataatggcctccagttccatccacgtccctgcaaaggacattatcttgttcattcttatgacagcatagaattccatggtgtatatataccacattttctttatccagtctattactgatgggcatttaggttgattccatgtctttgctattgtgaataatgcaccaacaaacatatgcatgtatgtgtctttataaagaatgtatttaataagttcgggcacagtggctcacgcctgtaatcccagcactttgggaggccaaggtgggtggatcacaaggtcaggagattgagaccatcctggccaacatggtgaaaccctgtctctactaaaaatacaaaaattagctgggcgttgtggcacgtgcctgtaatcccagctacttgggaggctgaggcaggagaatcgcttgaaccagggagtcagaggttgcagtgagctgagatcgcgccactgcagtccacccttgtgacagagcaagactttgtctcaaaaaaaaaaaaaaaaaaaaaaaaagaatgtatttaataagttctttaaggaccaggaaatttgtctcacgctgtatctccatctagagcagtgcctggcaaagagtagaaattcaataaatttttgttggatgagaattttcatttaaatcttaggaaaagaaaaatttgaacaagtgttatacctacttttatagccgaagcaactgaaggtgagacaggttcagtaacttgccaggagggcacagagatagagccaggatttgaatgcttgtccatttgacttcaaagctcatccattgtcttagcctctatctaccgtctcataatgaagtggaatgtatacacacaagactacaaaatcaagtgccagtggagtgccttgaggttgtttggatgagatcaacggaggagatggagtcatcagtaggaggggagttggcctcatgcatgagatttgtaaagatggaggcaggagacagggcaaaccttgggcctgggtctgcgattgtccaccgtggctttgtccttggctgaagaagccagttcccatcttctcctgggagagcagtgaggatggagggccagctgtagggtcaggactgtgtaagccgcattcctgggcctttgtttcaaacctaccaacaaagaacactctctggggagcttttgtggactgtggttaggcctgcagtcaggacccgcattctaactaaccagtgtagcctctggcaagtgcagagccactttgcagctccctggcaatggagatgatctgtgtactggggaaggcagctgggcccagaggggcttttgaaccacagcatttttcttaaagatgggggatgttattgttgaaccaggtaggaggtgacctgggaaccagcctccctgaaaaggaggagggagggaaacacctatgcccagggttatgtggtgctatttccttcctgattaaagatgtagatgccttggtacccgagccctggaggaggctccctcaacctgagaaagcactgtgctgcagctcatcctgggagccggctcccctgggtggtacagcacagagggaaggaagggggccgcagttcaagggcagcagctgggagaagcatgtcagaagtgccagggaagcaaaagtcggctagggaaaggaaaggggaggaaggaaaagcagagaggcagcagcagctctgggagaaagggacagcagacattagaggggcgagtgttctgggagcctcagagcagtgatggattttccatctttccttggaggaggggctgggtcttggaatcccctcccttctctgccccttacacacagtttgtcctgaggagcagacatgaggtctgtgctcacccaagcgctcacagtctccttctctcttcaatacccatctgctgggcctaattcttacctcaaaaaggtaactcttgattattcttaaaagtttaaaaaaaaatagtaactgtgattctggtctaagctaaaattatttttcctcaaggttgtctcccaagaaaaatgcttaaagaggccgggcacggtggctcatgcctgtaatcccagcactttgggaggccgaggtgggcggatcacctgaggtcaggagttcaagaccagcctggccaacacggtgaaaccccatctctactaaaaaatacaaaaattagccaggtgtggtggtgagcacctgtaatcccaagtactcaagaggctgagggaggagaattgcttgaacttgggaggtggaggttgcaatgagccgagatcatgtcattgcactccagcctgagtgacagagtgagactccctctcaaaaaaaaataaataaataaataagaaaaatgcttaaagaatatggaaataatttggtggtgtttaggtagattgttttcctcctcagagttgaaagtaacacagatattcattaacttttatcactgaaatgacaccatagcactgtagcccaggctggagtgcaatggtgcaatctcagctcagtgcaacctccacctccctggctcgagcgcttctcctgcctccaccttctgagtagctgggattacaggcacataccaccatgcctggctaatttttgtattttagcagagacgaggttttgccatgttggccaggccagtctcaaactcttgacctcaaatggtttgcctcggcctcccaaagtactgggattacaggcgtgagccaccgtgcctggcaggtttgttttggatgaacttgtcatttccagcactccctgcttgtgatgttctctcttgtacctgtgacactgaggaaaaccgttagatgccaagttcacctgagggactaaaatctgtctagatgtaagtctgatctggcgtctactgggggaagggaaagactggataaactgtgtttcagttcatatccattgccattcaattctgcattctaagatatggcaaccagtaggctcactctacatgtttattcaacggaaacgatgtccgaaaatttaactttcatcacaaagcattttaggtgggtagaatcatgactgtgaactgtctcctaaataatttagtgttccattattcccctccccagtacattttagatttaggtcctacacagttctagaccctggattctagggctttgcctctggaaccagcggtattggcctcactttgagagcttattagaaatgaagagtctccagcccaccctcaaatccaaggaatcaggatttactttttaacatgctccccaagtgatctgtgtgcatgttaaagtaggagaaatgctgctctgaggcatctgatcagcaggccctcccaggccctggcttcagggtagagctatttgggttgcagatagcaccatgccacactctgtgggcagagagttcaaattccagctctgctgtgaacctcatcacagggacaagtgacctaaaattaaaaaaaaaaaaaatcaaactcacagaaaagtcgcaagaatagtacaaagggccgggcatggtggctcatgcctgtaatcccaacactttgggaggccgagatgggtggatcacgaggtcaggagttcaagaccagcctggccaacatggtgaaaccctgtctctactcaaaataaaaaaaattagctgggcgtggcggcacacacctgtaatcccagctacttgggagactgaggcaggacaatggcttgaacccgggaggcggaggttgtggtgagccgagatcgtgccactgcactccagcctgggtgacagaccgagactccatctcaaaaaaaaaaaaaaaaaaaagaatagtacaaagaacttctgtaaatactttacctagactcaccaactattaacattttgcagtgtatactttatcatttttttcgctctacctatgtatgatgattattcctgaattcttggagagttaattgcatatactggcatgtctttaccctcaatacttcagtgtgtagctctgaaaacaaggacattttcctacataacgacaacaccagggctagaactagatggaggctaacaaggcctgagcgtgagtggcccttcaagagggcttccttcaactttgtaccctaggagcctctgttgtctcgccctagttctggcctgcatgctacagttatcaaaatcaggaaaccttactattatctaatctatagtctattatatctaatctataatctattatatacctatagtctaatctataagctattttccaatcatgtctattgtcccaataaggtccttcgtagcaaaaattttccccagattcaattcaggatcatgtatgacatttacttgtcctgtgtatttagtctcctttgatctggaacagtttttcaggctttgtcttttatgatattgacatttttgaaaattatagactagttatgttacagaatgtccctcaatatggggacaagtaactttttaatctcttaacggttcagtttcatcacttgtaaattgggaatagtccctccttcatgttgaatcaaatagatgaagacacgtaatgggcttgacacatggcaggcgcaggtggattaaacaagaagctgccactgatcaggcacttgtcagcgccatgccaagtgcttcaagtgcattgtctcatttcgtttttactgcagctctgtgagatgggctgtatttttacccctacttcacagaagaagaatctgagacttagaatcatttgtccaaggtctcatagctagtaaggagtgacatggggacttgaatcaagtcagtgagactgcaaagattattcgcttagtaacatgcttgtggtgcttgctaaaatctagctttttaaacataaaattttcctagagttcaccattttaaccatttcaaagtgtacattcagtgtctcttagtatatttacaatgttgtacaactctcagcactatccgattccacaacatttccatcacctcatgaagaaaccctgtacctcccaattcccctgacaaccaccgatctgttaatctacctctgtttctgtggctttgcatatacataaaatgaaatactactaagcaataaaaaggaactaactactgatacacagtaacattctggatctcaaaaacaacatactgagtgaaagaacccaaatacaaaagactgcacatggaaatattccatttatgtgaaattctagaaaaaatgccttaggaacagacagcatggcagtggttgcctggggacaggaacatatggttgggaggtggcactgactgcaaaggggcataagggaactttttggagggatagaggtgttctaatacttgattggtagtggtggttacacattgcatatatttgcccaaatgcatcaaattgtccactgcgtcgagtttataatatgtaaattatacctcaataagattttaaaaaaagaagaaaaaatcccaagcatatctggtcctgaatggagttcaattcatcagcacagctaccttcgttgtctggccccagatccatcttcccagcctcatctctcgcttctctgacacttgccatgggcaagcccagtgttgggcactcagagaacgtgggggaaggagaacctctatcttcagggaactcacagcctagtctgggagcagaaagaaagggcagccaactctgacacagcagggcaccattcctagaggaccactgagtcctaaaggacaggaacaagaatattccagacacagcctggattccagtcattttgaatctcaagtttgaatccagtttcaatctaatattttgaataggtaatacatttctatggctgtatactttaagccaaagagatgacagagtttattttattgcttttaggaatgtgggaatcacttgtaatatttaggttaattgatgtcaagtaattttcaggagcaactggaattattttaaaaatcactggattaaactgggtgcagtggtgcatgtctgtagtccccagctactcagaaggctgaggcaggaggatcacttgaacgcaggagtctgagtccagccaaggcaacacagcaagactccatctctaaaaaacaaaaccaaaccaaacccaaaacattgggttgacactaaaatatcatgatgctaacttgtgccaggaggtcctttacttgagggaagagcactctgtctccatccctaggatgaaaagattaaacttctatattctcctcacccttagaaagctcctattcataggaggtaaaaccattaaataaaacaaaaggaaaataaacctttcaagtctttgcctgcgcctatcagagatctatgtggaactggcagtagcttggctccctttgagtgctttggaactatggtcttcaagatttcttgcttgcttttctcctaaaagaaatttgaaaaactgtgtttttttcttccttcctttctttcctttttctttctttctctctccttccttccgtccttttttttaaaataagagatagggtctcattctgtcacttaggctagagtgcagtggcatgatcacggcccactgcagcctcaaactcctgggctcaagcaatcctctcacctcagcctcctgagtggctgggattacaggcatgagccatcacgcctggctaaaactgtttcttcttgaacttttaaaggtcatatctaaaatgtttcatcacaagtttaaataatagtaaggtttgttatttctggcgtaagtattggcattttaaaataagattgttacatcattctttaaacgtatccaaggaaatttaaagatcataatgcatctatcaaccatttaaaaaatatatgaacaagcttttctttaaagtaaattttacatcactttttttttcttatcttgtatttccattccacttacccctcaatattttaatataatattttaagctggagagtcttttattgatcaacctatcatatttccctacaaaaaaatttttttaaaaaaattcttgactgagtctgataagcttaaaaagctcattttgattgtataattttaatatctaattgatctaaacaacataaaatattacatattttggtatctattaaaattaaaggatatttttgctgaatgaaatagaattgggtcaaacctaatcctagttttcacttctatggatagaagcacaaacaccttgttcattcattcaacaaatatttattgagcacctcctacgtgtcaatagctactctaggcacttgggatacactggtaaacactacagataaatccttgccctcatggagcttacattctagcggggggtaataggcaataaacaataaacacaacacataagtaaatcatatagtatgtcagaagtgctatagtaaaacagaaagcagggtaaaggggctttgggtgtactgtgagagttaagaatgggctgtgatttttaaaaggtcaagataggcttcaatgaggtaacttttgaccaaaggaggtgagagagttggcaatgcagatatctgggggaaacatgtacaaggcagagggcacagccagtgcagaggccctaacttgggagcatggctggcatcttctagggacaagaaaagaggtcgggaaggttaggacatattggagaatgactgataggaaatgagattagagaagtaatgctcagggtggagtggtgatgctgatcttatagaaccctttagactattgtaaggatgtagatttttactctaaatgaaatgaggatcatttaatgcagggatttaagcagagtgcagatgtctgacttttttttttttttttttgagacggagtcttgctctgtcacccaggctggagtgcagtggcgcgatctccactcactgtaagctccgcctcctgggttcacgccattttcctgcctcagcctcccgagtagctgggactacaggcgcccgccaccacgcccggctaatttttttgtaatttttagtagagacagggtttcaccgggttagccaggatggtctcaatctcctgacctcgtgatctgcccgccttggcctcccaaagtgctgggattataggcgtgagccactgtgcctggccctgacttctattttaaaaggatctctctagctattatgttgggaagaggcaagcatgagaacagggagagcttttagaagatgaatccaaagatgagatgatggtggctcagaccagggagcagcagtggaggtggttagggatgctctgtggattagacatgggtgtgagaaaacgaggggaatccagaattgctggacagcactaaggatttacttgaggttcatggtgatgaaattaaagtgaaactgctcagggtttttggtctgaacaacttgaacaatagagttatcaaatgagattggaaagctagtgggttcaacaggtttgagggagaatattgctcagtttgtgacatgtttgaggatatcagaatctggagttcaggtaagagatccgagctggagatataaatttaagagttgtcatcatatatgatgatattatatatcttagatggtactgaaagtcaggagactggatgagatcacggaaatgagtatagattaaaaagagttcaagggaccaggtgcagtggctcatgcctgtaatcccagccctttgggaggctgacgcaggcagatcacttgaggtcaggagttcaagaccagcctggccagcaaggcgaaaccctgtctacggaaaaatacaaaaactagccaggtgtggtggcgggcgcctgtaatcccagctacctgggaggctgaggcagggagaattgcttgaatctgggaggcagaggttgcagtgagccgagatcatgccactgcactccagcctgggtgacagagagagactctgtctcaaaaaaataaagagttcagggaataagccccagttaaggggtctgagagaagagatggaacccagcaaagaagacagggaaggaggaaccacgaatgaaggaggaaaaccaagaggatgtggttaaaaaaagagaatcaagtgatgagctgtgtcagctgttacagataagatgagaaccgagactagatcattgggtttagccaatgtgaagttccttgttggccttcacaagagtggttttgatacggtagtaaggatgaaagcatgaatggagtttaagagaggatgggaaacctaacactcagctgatgacctaaaatacgccacatgtgtacctcgcatgtaatgattctactacatatgtatggagtcttaacatacgtatcatgcttgacatgtttttgaactttgtataaatggtattgtatgggatgtattctgctgttgcagaatgggagaagaactgcagacaaagtatagaaaactcttttagaagttttgttgtaaagggagtagagaaataggtgatagctgacagtagaaataggtcaaagagaagaatctgtaggattggaaaaatcacagctgcttgtaagcttatcagaatgacccagtagagaaatactgataaaacagaataggcggataattgctggagtgacagtgaggatcttgattaggcaagatagtactggaatctatgtcttggtgacaatactcctttagctaggagcacggcaattcaaccatgtgagggtggggaaggcaaagtagaggctggtatgtgggtgtgggtgatgctgagattctgtggaattttttctctcattgcttcaattttctaaacaaggctattaattgagaatgattgaggagaggacatgcaacttagaggacagagaacgtacaaaatccagaagattggaggcgggaagtagaattgctggacagcattaagggtctatctgaggttcatggtgatgaaattaaagtgaaggtagtcagtgtgattgtgttcttctctcgccacattcagatgcatgggtgccagcttgaatcagggttgtggctttgccaagcaagcacaacaaagggaaaaaaaggcaagggggctgagggcatgtgtaagagtgattgtgattggctgggggttgaggctgggtgacagcagatatgagggttcaagaattgttgcagttagagtactatagggagtgatctggaaaactgaggtagtgatcagggtgtgagatgtttgaaactgagataatgaagaagttgcagagtttgataaggctacggtgattatgaccatgggaggaagtggctgagttaggatatgtgcaagtttgaagttagagaaggtacaaaatctagaatgatcaaggggaggatgtgtaagttagaggacagagaaggtataaaatccagaagagtggatcagggaagtataagagaattgctgaacagcactaagggtctacctgaggttaatggtgaacagtgggagtctccagccaacagccaggaaggactgaggctatcagtcctgaggcctgcaaggaactgaatgctgccaacaaccacatgagcttggaagcagatccgctatcccagcctcactttgtagaggacccagctaagcaacgcctggactcctgacccagagaaactgtaagatcataaaattgaagcaatgaagaagatccttgagaagaagaaaaggaactgagaggccagggtactgggaagatcttataaccacctaccactaggacagaagtggcattggagtgaatgtcaggagcaaattgtgcagagatgaagcggggtgaggtcagcgatagaggtatcggacagcaagatttaaagctgccggtttagaggaggagggggatgacctggaagcaatgttgagaagcaagaaggaaacctatctcacctccaggcactaagaagctgaaggttgaaaacacagttgccggaagtagttctgtcctgtggggttcggcatcatgcaagttccccctgggctgttctctgatacagggcacttgctccacactctgggaacccagattaaccagtctgccctgtcacatagttgaaggagttgcatttatctttctggctcccaattcctttaaaattacatttgttgcagaacctccacaaggctaaataaaataaaattacatttgtgaccatcagagaactgaagaactattaactggctgttctggttttgctgagatcgggctgttgacagttcctggttgtcccacagctacccatgtcagttatctccactaacatttccaagaatctttgtaggacaatttctccacctgcaaggtctttcaagtaagaactcttctttcctttaaggcaattagcccattgccaaaaggttttactgtcttaaagctggaactatctgagatctaattccaaggacttttctacagctaagtgagatgcctcacaccagtattaggtgattcttcgtgaggacagaacagagcattttcatcttgtgtttaaagcaatttgttggcttcggctcctcaccactttctataccagtctcccattcacgtccctagtaatgcctatgccaaaaaaaaagaaaaaaaagaaaaagctgacggtgaaacctacaggtttaagggcttaaatctcaacctttgtgttaggagtaacaggagtgtgctgagagggcaagcaataaaacaagtcataccaaaaggccacattggtctctcctaagccccaatcccactccactcctgtggccagtagtccaaacagaaaataactggagaagacgaggaggtcaaggatcaggaaactaaacgttatgtgaattcaccagcaagatgtacagaacgcttgcgtttacattgtttttatggaactagcagaataaaactgatctattttaaaaatgaaaaaaaaaaaaaaacaaaagaaagaaaacacagttgccactacttgagaggtggaaggaggagcagtgtcccagggcaaagttgggtttccttaagtaaaaaggtgaagggaacctgaagggaaattctgagaagaggttgagcttacagggaatatcatttgcataaataaatacatggtgtggtagactctaaagaggccccatatgattcccacctcctggtgttcaagcttttgtgtgtttccttccccttcaatgtaggtggcgcctgtgatttgcttctggccagcaatgtatggcaaaggtgacagagtatgagtgatactgtgtatgtgatgatgttacataagattgaaaccagtgtcttgctgagactcttcccgttgctggcttcgaagaggcaagctgccatattgttagcttccctatggagagcaccacatggcaaggaacagagggggtctccagccaacagcctgcaaaggactaaggccctcagtcctgtagcctgcaaggaactgaatggtgccaacaaccacatgaacttggaagcagatcctttgttccagcctcactttgtagaggacccagctaagccatgcctggaatcctgactcagagaatctgtaagatcataaatgtttgttgttttaggcttctatatttgtggtgagattgttatacagcaataggtaactaatacagacggaatagaagaagtttagttataacaatgtctcaatttcttaaaaacttcttctgaggtatattacctaagattcacatattgatctgttaccaaatcatgttttgtaatctatcagctgacagatcttccttcagttttgttgacagaaaagatttgaaaactatctgacttgaaaaataatttaatatccattcactaaggtcatttactttctcagcatagataccgatttttgaattgtcccttttggattgctggggaggttctgcattgatcccatgcaccttagtagtgggtgagaattttgactttcttctgtaaggtgggaggacagttttgaaaggggatgctgtgtcctcagctcctttctcaagctgggcaagtttagaaaatagaatatatagcaatggaagatgtggaaatgaattcccttaaaactggtctccataaaccccaggggtaagagaacaccagtttggagctttaggggctttctggtcaaagagggaatggcccaggcggtgatgtggaggatagaatgaagcactgagtatgagtggcgaaggcgtacggtgggtgtagagattttctgggcgacgtgacctaagaaatgactttagaactggctaatcattggttttggagggactaaaagtagttcctggttggtgaaaataaatcattaatgcgttttaaatgaaaaagaaatgcatgcgtcttgtaaaaaatgtgaaataaaagaggcataaagtcaaaagcagagcctatgccttcccccaccaaacaaacaggtaacctagttaacaggtgtgtcgtaggattcgaagttcgcctccagctccgagagtgcgcctacatctcttccaacaaaatccactcacacttgcaacgcctggcaaggctcttcaatatgtgattccttgactgtcctgtgcgtctctcgagtgtaaacacctctggggctcgtgattcggggctgccagaaagagaaggaaggtgccgccagcgtctgtttcttcccgaagtgaactcctacaacctagccaccttctccccagagctgtcgactggctgttgaaggccaatttttgtgcctacgcaggtcctcaacacagaacaaaacaaaaaaacaacaaaggccgggctaatagctatttataaacacttactggacgcccactctacgccgagctctcccgcgctccttggatacttttttgcaacgagatgccaatttccccggcgaccactccctcaaacaggccttcgcctccgcccgcgctgaggcccaggcccaggtccagattcagagccgcccgccggctggcgctgccctgtaggcgcctgcgcagagcgaccctccccgtcactcggagcgggaggcgggggcagccgggagaaaggaaagctgcgggggaaaagggccaaaccctgaaattacccggatgtggtccccgcgcgcgcatgctcagtggcttctcgacaagttggcagcaacaacacggccctggtcgtcgtcgccgctgcggtaacggagcggtttgggtggcggagcctgcgttcgcgccttcccgctctcctcgggaggcccttcctgctctcccctaggctccgcggccgcccagggggtgggagcgggtgaggggagccaggcgcccagcgagagaggccccccgccgcagggcggcccgggagctcgaggcggtccggcccgcgcgggcagcggcgcggcgctgaggaggggcggcctggccgggacgcctcggggcgggggccgaggagctctccgggccgccggggaaagctacgggcccggtgcgtccgcggaccagcagcgcgggagagcggactcccctcgccaccgcccgagcccaggtaaccgcgccatgtcccctccccttcccccggccgggcccgcgcaccccgcctgtggcttccccgccccggggcgggctcccgacgacggcggcggcggcggcggcggctgggagcgcgcggaatcctctgggagggcgaccgcggcggcctgacgagccgggccgggcgggccggctgaatgccgggcggcggtgcctcgcgtccctcgggcccccagctccgcttgcagctcgtgggagaatcaagttaaactcggacgggactcctgccgcggccgccgctcctctttgttgttctcagtagtttcacggtcgccccggctgagcgcgttgggtcggctggaatgtgttgccttagggtctaagtgaaagttgtaaattgtttgtctaaatttattttctccagccaatttctgttttgtctttgtcccctactttctcttcctagtcttgtcatgccagtttacgcttctggctttgatatgtttactttttgagtactgagagtgacagcggtatgcaggacacattcttagcacctaactgaacccctccttgcccccaataaaacatgcttcctaataaaagacacagctgatcttactgttagcactgcatgtactgacagtgaaattggtgtagggtggagggcggtggctccatcacttgtcccaaactgctgttaggatttctcaaactagattttcaaagacacaagtgtgtttagttaacctgaaaggtttatttgctggtgcagaggctttaaaaagccctgttgaagattgatagctgtttcccttcaaaaacctaagtacgtttgtttttatttaaaaaaacacatttatttcccaattagtttcttaatgcatttagtttttgcaccgtagtttaaggtggaattgccagttatttaggaataataaacacaacaggataatagcggaattaccctgaattgactttctgcaaacatataatcttagctaatttttgttagtaacctttgacttttgccagaattagcatccttctagtcttagtagcagcttggttactcgggtgttttaagaagtaggttcactcctttttgctggcaaaaaccatttagtatcaaaaaaaaaaaaatgcgtaatttcgtaattagatttagaacaaggcatttgaataatttttatggtggatttcataaattacttttgccataccctgcagagactagataatatatatttcagttgaaatctaggaagttctaaaatgtaacttttttttaatgctaaggacttactctctctatattggaaagttctgatatgattagtacataatattccaaactgtaaaatgattaacatttaaaaatacggtttttaaaattagtgtttcttccataatgctgtcatgattttgtttacttaaatgggtttgttacagaacaaatgtaatagagatggaccaagcatttgtaattcggagtagctttaggtctaaagacgatggtgaattatgtaggtttaagttgttggaattaaaactaaaagcttcttttgataaaagtcgttataacattttgtgactctattaatagaagtggctttttctttgctttccaggtttttgggcgagttttaaagaagtattgcatcttcgttttttttatttttgaagtgggagtgtatgtttctgtttaggtcactgccttcattgtaaatcttgagtttagaaaaaaccaaactgcaaatctgtttttcagacttaatgaaaatttgtgccgagaaagtcactttgaaatattttggaataagttttacatgaatgattgatcttttatgatagctttgctgtttgaagcaattctccctctactaggaagcagcaaatcttacttttaaaaacctctgcttcactttcttaagctacattttagtcgagcgattgtgtgtgaattctttttctgtattccccttcagtttttctttctccccgcaaattaaggagcgagaattaacctaatttatgctgcccagtcacactccagctctcccacttggaagcagtttttttctgattgagccagtgttatagtaacatcattagacactattctaattgaggtgtgagttactgaggcctctgccagggaggttaaccctacagaatctgtagggttcattatatttaaactgcatatttcggcttgtctaaatttttgcctattttggtgaaaacatgttgttttgtcgatgtttaaacttagttcattttgtccctctctagttcatgactaccatttttttcatttttaatccagcgatttttttagagtggttctttaagcatcttgtattagccatttcaatggtcattatatatgtttggatttctcttattttgttgaactagaagaactgtgtggttacgccccaaaatttttttttgtcttaaagccatgatgaatggggtgactctgaggtgaccattaatcgcgtataaaagtaacctgactaaaatgttttcattgttttctacagttaaaggacttacaccagcataacacagcatttttttttttttttttttttgagatggaggctcgctctgttgtccaggctggagtgcagaggcgcgatctccactcactgcaaaccccgccttccgggttcaagcgattctcctgcgtcagcctcctgagtagctgggattacaggcatgtgccaccacgcttggctaatttttgtgtttttagtagagacgaggtttcgccatgttggccagactggtcttgaacaactgacctcaggtgatccgcccgccttggcctcccaaagtgctgggattacaggcgtgagcactgcgcctgtcctataacagcatttaatacagttttgtaaaatatcacattttgggcttttgtcaacagttgatgaagtctcaattgttttaaaatgagaaattcaaacagttcacaaatatatctagatatattcatttgagctacttgtagaatgatgctgtttgcatatatcaagcatatgcttgatcataagtcagatttagaatttttggattttgttttctctttctaaaatgtgtaattttggtaatgggaaatttgactgaattccagtttctcaggaacaaggtattttaggttgtgtcaccttaacactattacctggtgtaattggcatccgggaacatttgtttttaactatgagagtgaatgaaaactagggtagtgcttacatatgtaaaactaagatggtaggtagtcggattcttacaatttataaggttctcataatctaagccttgatgagttgctactgcaaattatattatagatcagataagtaccaaagaccagttgtaaagagggtctgttaacattttaatcagtttaaaattggcggtaacagtaaagaccgttcagcccaaagactgtatttcattatttatattccaaatgagaattttttgcagtttggaaaacttgtaaatgtgttgaattcatctttttattgcttttttactcccaatgtttagggcaacggtcttttcttctctcctgtctccctccctccctccctttctccctttttcttctttttcttctttttctttttttttttctgagacggagtttcgctcttgtcacccaggctagagtgcaatggtacgatttcggctcactgcaacctccacttgctgggttcaagcgattcccctgcctcagcctcccgagtagctgagattacaggcgtgcgccaccatgccaagctaatttttttgtattattagtagaggacggggtttcaccattttgggcaaggctagtcttgaactcctgacctcaggtgatccacccgcctcagcctcccaaggtgctgggattataggcatgagccaccgcgcccagcctttttttcctttttctttccatcttgctcagtgccccagcctggagtacagtgctgcaatcatagctcactgcagcctctaccacccaggctcaagcaatcccacttcagctgctgcggtagctgggactacaggcacacaccatcacacctgtctaattttttgaaaaatttttgtagagatgggggtctctctctgttgcccaggctggtcttgaactcttgggttcaagtgatcgtcccacctcgacctcccaaagtgctgggattaaaggcatgagccaccacgcctggcaagtagttttcaatcttggctgtacttttagatcccttgaggagctttacaaaatactgatacctgaattctagccccagaaattatgatttggttggtctagggtgcagccaggttagccctccgcagtgattgagtcattagggtcctctgactttttcttttgaactgtttcacttgtgttagctttacattctttaatacagtgttacacacatgtacagtgtagccatctcacacatctaacttaacgggtcttttgaaagtattgccacatttgctttgcttctgtgtctgtctctttcttttctctcccccttcctgtcacctattcctttctcctctgtttctttcttcactttcagtttatttgaactgtctggtagtaagttttaggaagctgtatttcccatgatgagaagttagtatatcatcactattttaaataggaagttgattttcttttaaagtatattctcaaatgcttacttgtactccttttggagactaattactttaagtccccaagttagcatctgaactccctgtgggcttggtctggtggctcacatctataatctcagcacttcaggaggctaaggcaagaggatcacttgagcccaggatttcaaggccagcctgggcaacaaagtgagacctcatctctaaaataaataaataaataaataaatataactcccaatgcaaattgtcttcttagggcgttaatctacttggtaaaccttacattttcaagcccccaattaactagtcacttaactggtttctgagaggcaggttgcattgggctttttctgtcagggcttaattaatacactgtgagacatttgctcagctaggccagctagctagtacttctgtagagatcatctagggcatgttcagctctccatttacatcacctgaagtagttcccaagtgctgggctatggagtagtttcatctctgtctctggaagagctatttaaaaaaataaaaatattttttcccatctgattgcaacacacatgctgcttcagaatgggaatggagtggaggaggcatgggaatctgtgttatttttaaaaagtgcctcttgattctaaaggttttgtttattttggtatgcttatccttactgctttatttatctattttttagagacaggttgcccaggatggagtgcagtaacatcatcatagccctctataaccttcaacttctgggttcaagagatcttgcctcagcctccagagtagctaggactacaggccggcaccaccacgcctggctgatttttttaaaactgttttgtagaaatgggggggcgggggtcttgctttgttgcccaggctagccaaatcttatttatgatttaaaactaggaatgctaccgaatatatatttttatagtaaggtattatttctgtatgttaatatggatgaatgtatgctactcaggtcttttcaagtcaaaatgtatttctaaatataagatgaattaaggatatttgtcagtgatattcactagtgaattctagagcatatgttatcagtagatgggcagtccttgtaaaaattgaataatctagtgaaaggatgaccggaaataatatttaatggggtaagctaagccaggaatcattgtacataaacacattaggtgtgtcttacatcataaatatgcctactaaaactagttgaaggaagaatgtgtatagatgctgaaataatgaaggggctggctaattgtaaggaaaaatgatacaacttctatataattagtctttttaatcagttgcatatactcatgatacttaatttgtaaagtaaagattgtagactagatcaatgctttgtaaaactaacagtacctcagacttccagagtgttttttaaaggtacagccccacccttgattctagttagtggagctggcctaacctgcgggggattttgatacatccccctttgaaggaataagctagatgacttgaaactctgcttcagttaaaagttttatgaaatgaggccgggtgcggtgactcacgcctgtaatctcagcactttgggaggccaaggggggtgcggattacctgaggtcaggagtttgagaccagcctgaccaacatggtgaaaccccgtctctactaaaaatacaaaaattcattgggcatggtggcacatgcctgtaatcccagctactcacatgcctgtaatcccagcttcttgggaggctgaggcaagagaattgcttgagcctgggagacagaggttgcagtgagctgagattgtgccactgcactccagcctagctgacagagcgagactgtctcaaaaaaacaaaaaaagttttataaaatgtatttttcagttatcagttattaaaattcagtttggtttccaccatcttttaaaacagtggttcccaaagtatggtccacagactcctggagatccctaggatccttatatttaaggggttcacaaaatcaaaattattttcataatgaaactgagacgttatttgccctttcactgtgaggacatttgtatgggtggtgaaggagcagtggtgggtaaactgctggcactttaaaatgactctaggcagttataccaaacatatgagtcctcattgtgttctttatagtcaaacacacataagcatttgaaaaaatgccggtttcacttaataatccccttgctgcagcagtaaaaaggtttaattttaaaaaaatctctaccttggagtatgtctttttaatagtgtgattaaatgggaagtatgcataaagcatttctgcacattgaagtacagtgttcttttctaggaaaagcacttgtgttattgagctgcaagctgaactagctgctttttagtgggacaccatttttatttttatttaacaggatgacagataagctcagatagctatttagatttgagtatttggcaggtaattccttggaaatgaataaagtgagctggccacttcgaggagaacatttatagccagtgctaaaatctgatgtttcaagtgaaaatcagatttttgggaaactcctgtcactatgacttgccagtttcttaatacttaaagacttttctgatgagatgggtggtgatattaaggaatgtgattaaaaaaaatatgttgggctgggcacgatgatgcacacccatatttctagcactgtgggaggcggaggtgggagaattgcttttggccaagagttcgagaccctgtttctacaataacatataaaaattaggtgtagtggcatgtagttctagctgctcaggagggtgaggtgagaagattgcttcagccagggagttcaaggctggattaagctaggatcgcaccactgcactcgggcctaggctacagagcgagactggggggggggggggcagtatgaggaagtgtgtcaacactgggaagatctgtgtaactcattgaaccaatattttcccaaatgaccaattcatgttacaaaatcgtgcatgggtaggcgatccgttcaaagtacaacatagacaaatggatttttatatacaccagagccaaaaagttcactgatacagtgaattccacattgcaactaacctttcagaattgccacttgagttttggtgttgaataaaagatgaatatccattgttttctgagaaggctgttaaaatactcctctcttccaattagctgtccatgtgagacacgttttcttcatgtactttaaacaaaacaacatatcatagcagattgaatgcagaagcagatatgggaatccagctgtctcctattaagctaggcattaagagaaatttgtgaagatgtaaaacagtgttactctgattcctgactttgttttagaaaattctgtttttcataagatgtttatattaacgtaatgggtttattattttaaatgaattaataaagcaaataccaaaaattttagtagttttatttatttataatatgataaatatcaatgtatatagcccgcataaaagctatttggtgtctttaataatgaagagtataaataaaggtccaacttggccaacatgacgaaaccctttctctactaaacatacaaaaattagctgggcatggtggtacatgtctgtaatcccagctacttgggaggctgaggcacgagaatcacttgaacctgggaggcggaggttgcagagagctgagaacatgcctctgcagtccagcctgggcaacagactgagactatgtctcagaaaaagaatatgaataaagggatcctgagatcagagagtttgacagctgctgttttaaagtaactatttctatgcattatcaactaaattactgattgattgaattgtttttatggtttgtactatattgctgttatttctaaggacgttagtcattcagtttctgttcagttatcagggaacatgtaagagtcagacttaagtaaaaaggggaattcattggcttggtctggagatagagctgacctcagattgctatatccagggtttcaagcagcatcaccaggactcttgactttgctttctttctgtttctcaggtagtttgcaggctaactatccccagcttcaaggaagcatgaagagggccttcccccccccacccccccacccccccaccccccgtagttccatcggaagtgctagagctatgtcacttgcctgccttgcgttctttttcatcagaaacaacactgtggccagggggtggctctggttagtctgggaattgtcccacctggccagatggggagattctccttggaaaatcagactgctgttttacaaatggagaaatacatgctggtacacaaaaactgatgtccacctatagtactttgttatttcttcttttaacagcctttaatttattaatccaaaaagggtaatttttaaataagatcatttaaactgaaggtggcataccaaaatgacatttaagacacataggtaaacaagaagcatacatctcgatttgtcctttgtcattcatcttaaaagttaaaaaaaaactttttgttgcttttattgctgtataaatgtgctcttggaagttcgccaactgccctcagtttgaagaacctcaacttgctgtctaggatttagtctttagcttgtgctgcagacagttgcactaaccgtgaacacctttttttcctgttggtaaacctaagtttagagtttattcctagtaataacattgatatattaccaggcccagcttttttctcctcccctagttaaatttaagcacttttgcgccgggcatggtggctcatacctgtaatccagcactttgggaggccaaggcgggcagatcatgaggtcaggagatcgagaccatcctggccaacgtggtgaaacttgtctctgctaataatacaaaaattagctgggcatggtgatgcgcccctgtagtcccagctactggggaggctgaggcaggagaatcgcttgaacccaggaggcagaagtggcagtgagccaagatggcaccactgcactccagcctgggccacagtgaaactctgtctcaaaaaaaaaaaaaaattttaagcacttttctcaaatattcccatagtaagtagtttattgatcactgatcaaaacacttacaacttctagaaaatacatgtttgacacatataatacagttaattcaaaagtaaactaacatctgagaaaaaatgtcaacactccttacctaaaatacatgaatttacatgagaacctctctctggccagtattcagcctgtttaattttagagagtatcttaattagtttggttatttggctttctcgtccatttattagtatacctatggtcaacgtcaggtgacagcttacaattaatagcaaggctagaggaaaaacaacaggcagataacaagaatcagctgtctcttcttgctaactctttacctctcataactcttgactgcatctaatacctgtatatgttagtgcctttcagataggcctaacttctcatctcttcaaactcaagatatctaaagctgaatttgttacatacctgcttttaaattttttaatcattgagttatctagaaatgggtcgtcttttatttgtcccccctttttcacccttcatatttcagttggttaaagactccagtcttttctacctagaaatagctcactgatttccccctcccctccttggcccattgcccatgccccagtctaggatcttaccgcttttctggtaattgtttcctaactggttttctatttccttttccaaagctgttctccaggctctcactgaagttttctaatacaaatctaatgctgttttttctcctctttctaccatgaacctactctagacaaagctcttatccgtctctgcttttcctcatcattttccttcagcctggcaaattcttattcgtatgtggtaatccattaatactattctaccaatattctgatggctgtcccctggcacatggtagtattgtgcttctttgtctccctcatccctaccttgaaattaggcatggcccagagtttcttgcattggcactgttgacattttaggctggataatttattttgcgtgttgtccagtgcattgcagggtatttagcagcaaccatggcctttagccaccagatgcccagtagtatccagttgtgaccatatattgcctccagatgttgccaagtgtcccctgagggacaaagttgcccctggttgagaactcctggcatggccttatgactttggccagtcaaacatgagcagaagtggtagcctttaaaagaagatatatgagctgtcctatcccttctcctgccatttaaggacatatgtagaaatggagcctttgtcagtctaatttctgagcgatgacagcagtgcccccagttgatctgtgatgaatgtgtattatatcctaagcagaaaataagcttttgttttaagctactgatcttttgggggttggttgtcactgcagcatagactagccaatcctgactgatacgttgtgccaagacctaggttacctatgaactttccatgctccctcatttatagtcccaaatcactttatacctacttcttttagcatttattacttatgtaataatatgtttgggtcttccagattagtagttctcagtggagtaagtactgctctttaagggatgttgtagaaatttgtggatgggtttggtggattggtggccagggatgccatcctgcaatgtgagagacagcgaataattatcttgcatcccacaagactttcagatgccccagaaattcatgtaggaggaaaatataattagcccagaacctaactctataatatatattcactttgccaggagttaaatttcttttaattcatttttttcttgcctgcctgcctccctccctccttccctccctccctccctccctccctccctctctccctctctctttctctctgttttctttctttttccttcctccctccctgcctccctcccttacttcaggctctgttacccaggctggagtgcagtggcgtgatcttggctcactgcaacctctgcctcccaggctcaagccgtcctcccacctcagccttctgagtagctgggactataggcatgtgccaccatgccccactaattttttgtattttttgtagagaggaggtctcactttgttgccaggctggtcctggcaaccgtcctttgttgccaggctggtcctgagcttaagtgatccaaccatgtcggcctcttaaagtgctgggattacaggcatgagccactgtacccggacttggttgttttgttttttatttttgagaccaaatcttactctgtcacttgggctggagtgcagtggctcagtcatagctcaccgtagccttggtctcctgggctcaagcagtcctcctgccccagcctcttgttaattcattttcttagttcaagttgtttaagagttcaccatttgggaaaatccatgttactgactgcagtgccattgtgctatttgagttgccagtataacacgtttgtcttggaaggtctgaatttgtagctgtcacatttgtaatgattctgtatataagtgctagcatctaacttctttattatacattctaacttagttggcatgcctgagtatttataggtggaagtacacattatatattaagcttttcctcctttttgttatagttagggcattgttaaattttcaaaatatgtttaagtagtttagaattttgtttcagtaaagctaaggtggtgatataaattatttgttggaaaaaaaatgggatgttggtctgagagagtccagacccactttcttactatgggcttcctgtttttgtatctgtagtgctttgtatatacagtgtttgttgaattggtcaatttatgtttcccacatttcttttatgtacgttgttgcatctaattaccacaataaatttgtgaagttgtcagggcaggtgtttccattttatagatgagagaattgagagagatgttaacattcagtcatgcggctagacctttaattagaatatataattttatttatatcgatattatgctcttgcctaccatacttccataatctagaaccatttaatgtaggaatacatctctttattcctgctagtattattttttatatgcataacttttaattatgtttcaggcacttgtggtcataggaatacaataaagagagagatgagaaagctgtttgtttaagaaagcgaggtcattatcatttgtattcaaagcaacttggtattaaaacaaactttgagataccgttaaggccccagcatagcataaattttagaaatgatgacatttgatggtgagattgtggtgaaatagttaacacttaaacattttaattgcattgtagattcatacacatcttttggaatataatatcagaaaatgacttcaaaagtgtctgcactcttctaatttgttgtaagacaattccacagaataaaaagctatggtcagtccagaaacacttgcctggtatatgtcaggaactgtgcatggtgctgggaatttctaaaatgagagtgttgttgctgttttcttggatttctaatttgtggcaacaatgtgagacagatatgtaatcaaataactaatgtgttacattgtaatttacacatgtaatttacaattaaattgtaatcgtaattgttaaattgtaatttaacgtatctttccttttccctctttcccgattcctttcctttctactgagtctcactctgttgcccaggctggggtgcagtggcacaatcataactcacagcagccttcaactcctgagctcaagcagtcctcctgcctcagcctcctgaggagctgggactacaagcccacactaccatgcctggcgaacctcctacatttttttagacagattttaatagaaaatgcagaaaaatgcgtaatgcattttaggaaaaatcttcttgtaaaactattattatttttttgagatagggtctcactgtgtcacccaggctgtagtgcagtggcacaatcacagctcaccaaggccttgacctcccaaggctcaggtgatcttccagtctcagctccccgcgtagctaggacaacaggcgtgtgccaccacacccagttaatttttttattttgagtaaagatcaggttttgccgtgttgcccaggctggtctcaaactcctgggctcaagcgatccacctgcgtcggcctcccaaagtgctgggattacaggtgtgagccaccgtgcctggccacaattaagcatgttaatatttcaacagtagcttttttactgaacactatgtatcagacacgttatgcagaatttttcctttgagcttctgtataccctccttttaatccagattcagagtaacttcattttctgactactatgaaaactggaattctaattcaaatctcttgactccaaaatctcccatgcaggttatctttggttatttggaaagtgtaccttcagcatgtgtattaatgtgggcaagtgctctaagacatatgaaaaactgcttctctgcatggggtttatgagttgagacagacatttatgtgaaagagataacaacagagggaggagcaagtcttcaatatcaggtgattgatgtacattctgaagaggctcaaaactacaacagtggcagggagaatgggaggagagatagaaaagactgaggtaaagaatcttgtaactgtaacggaatgtagggatagtgaaggaaagaggcacgtcagagatcttttgcaaagcttcccaaggctaggtaattgagtggaattgatactttaacaaaggtcttcagaagaggaagagattttggtagaatgatgagttttattaatcttgtgggaggatactttaaggattcaagtatgcagtaaaagaaaatgaaagcaagataagtctggaatgcaacttcagtgaacaaataaaatacaaacaagcacacaaagtacaggctccagtcctgctttatcttctttattcttaagctaatggccttttcctattctctgtggggtcttgggatcagataagttagttttctacctgttgaatggattctttattaatcttcagtttttgttattttaatttttttgaaaataatttaccctgctgcttttacaggtaaaatcttttgaggaatttagtgatctctttaaagaacagctgtattgagatataatttccataccataaaattcactatttgaaagtgtacaattcagtggtttttactatagtcagagttgtgcaaccatcaccattatcaatttttaggactttttcattataacaaagaaacaccatacccattagcagtcattcctcattccccttcctcccaggccctggcaaccactgatttactttctgtctctgtggatttgcctattctgtatatttcatataaatgggattatataatgtgtgaccttttgtcactgacttctttcacttagcatgtgttttcgaggcttatccatgttataatttgttagtactttattcttttttatggttgaataatatttcgttgtatggaattttatctatgcattcatcagttgatggacatttgagttgtatccattatgaacaacgctgctatgaacattcatgtacaggtttgtgtggacatgggttttcatttccctcaagtagaagtgtgaagagtagaattgctgggtcatatttactctgtttaacattttgtattaataccagactgttttccaaagtacctgtgccattttgtaatcccagcaccaaggagtgagggtccaatttctcggcttcttcaatacttactattgtctttttgatatatccatctcagtaggtatgaagtagcagctcattgtggttttgattttcatttccataatgtctaatgtcgagcatctttcatgtgcttattggccatcgtctttggagaagtgtcctttagaatccttttgttcatttctaaattggggtttttttttttttttaattggtctcttttaacaaaggtgagtgttaactgctaggtagaatttcataccaggcgatggtaaatttttcataaatattagtaatagacttttaggtttaactagtgctgatcctcataagtaatcctttaaaaaagtgctggtaagattttcctttagggtgactagtaaagtcagtaagacttgattgagcatgccactatcataatgagaagacctaactttaatatttttggaatgtcaaaaacagtgacattttaattaagtaattttatttttaaaaattatttttaatggctaatattttgtaagaattttaagtaattttcaactctgagcatcaaattttaattatgtgcattgaatctctgacttaaccagagcaatttcatcttttcccaagtagtcagatctacttcgtaaaatgtgttctgatgtgtgtcttttttttttttcttttttaggttatcctgaatacatgtctaacaattttccttgcaacgttagctgttgtttttcactgtttccaaaggatcaaaattgcttcagaaattggagacatatttgatttaaaaggaaaaacttgaacaaatggacaatatgtctattacgaatacaccaacaagtaatgatgcctgtctgagcattgtgcatagtttgatgtgccatagacaaggtggagagagtgaaacatttgcaaaaagagcaattgaaagtttggtaaagaagctgaaggagaaaaaagatgaattggattctttaataacagctataactacaaatggagctcatcctagtaaatgtgttaccatacagagaacattggatgggaggcttcaggttagtcttataagagtttttctataccctctatggtggcagatttaaaaacttgctacgtttcctttcaagctactacagggtaatttaatttgtgctccatctcttcagatactgtgcatcctgtacaaatatgcattatgggaatttctggaagaatatgcaaaagataaaatcttaaagttttttaatgttctactcagaaaaatgttcaatggagaaaatttggaaaataaaaataaaaagcagaaaacccacacttcgcaagaactacctttagcactttggtattcatttttgtagcctgttgttttcttttttttttttttcctagacggagtcttgctctgtcacccaggctggagtacagtggcgtgatcttggcccactgcaacctccacctcttgggttcaagcaatcctcctgcctcagcctcctaagtagctgggactacaggcaagtgcaaccatgcctggctaatttttgtatttttagtagagatggggtttcaccatgttggtcaggctggtcttgaaccgctgacctcaggtgatccacccgcctcagccttccagaattctggcattacaggcgtgagccactgtgcccagtcgtgttgttttcttttttgatattgtatgtacatttaaacaaccggattacacttagtccttttataatttagaaatctgatatgtttcactgttagcaaatgtttcattggtcacatttttcaggtagaacttcataatacagctcccttgcttaaataaatcttacagaaattttgtcgtagattttaaagttttatttcaagactttacacatagtttctgcaacacagtctttttgcatatttatttattttattttatttttttgagacatggtcttacttttgcccaagctggagtgcagtggtgcaaaacatggctcactgcagccttgacctactgggcttatgcagttctcctgccttagcctcctgagtagctaggactacaggcacataccaccatgcctgggtaattttttattatttgtggagacaagggtcttgccatgttgtccaggctggtcttgaactcctgggctcaagcgatcctcctgccttggcctcccaaagtgataggattacaggtgtgagccaccatgcccagtcactttttacatttttaaaacctgagcacaggccttgaaattataccaaggtttaaattctaggtctgatgtatgacatggccaagttagttattgtgaattttagttttcttatttatgaaatggggattgtaatactgagttggtaggattgtgaggattaaatcagaatatataaaagtgtcttgcataatgtgacacatgaataaatggtcgtttatttttctaggtggctggtcggaaaggatttcctcatgtgatctatgcccgtctctggaggtggcctgatcttcacaaaaatgaactaaaacatgttaaatattgtcagtatgcgtttgacttaaaatgtgatagtgtctgtgtgaatccatatcactacgaacgagttgtatcacctggaattggtaagtagactttgctttcatcctaagaaacataaagggaaaaggatctcaatagtgtttcaatttttgtaagttaaattataaatttggaagatagcccgcgactttaaataaggttaaagaatcagacatttttaatatacgtatttaaatttgaatttaggaacaaacttatattttgactgctaaaaccgagtattgtagttgatattttgcccctttagaacattgtttttgagaaataagatggaaagcattataaatttgaatacttagttatgtattgttagatagcgtttatgctacttctgaattgaaatggttcatgaacttttgtaatctttggtttaaatttacattctctgtttttaaatggaaaatactttcattgtaatgattaatgtttcatttgttttcccctttaaacaattaagatctctcaggattaacactgcagagtaatggtaggtaatctgtttcttactactttctctttgttttgtcctatcctctctgtttttttgttgacctagaattagtttgtgtgagcggcaggcagtaacattaacaagaaaataacttactgctttggaaatgtagattttgaggttaggggcatttaaaactggatttaaaactggatttaaattggctattgctctttgtatttgaactgcaatttatgaactaaagtactgtaaaaaaatatgatagaggaatgcaccaaaaacaaatataaagaatattttttgagttaagacctatttttgaagaaaatctcacagagccagtttaaatggatgttaaatacccagaatatttggtaatttggaatcacatataacatatcctttaaaaataccagtattctaattttccttcatttcagcctaacatttttatgaatgataatgttgagaatggtttaaaattgcactcttttgtattttttcagtcttgttacattttgagtaaataaatcaaggctactttaaagcatatgcccatcacagcttacctaattgtatttttaaaaagaaaaagtgttttaaggtgagaaaatgaaatgtgaatgggggtgtttttgttttttattgtaatatttgagaatggagttttattaaatctttagctctgttacttagaacttaataaactaaaatttctgtaagaactaattaatttgcagagaaactcttataaagaaccactgtcagccaggcacggtggttcacacctgtaatcccagtactttgggaggcttaagcgggtggatcacctgaggtcaggagtttgacaccagcctggccaacatggtgaaaccctgtctttactaaaaatataaaaaattagccaggcatggtggcgggtgcctgtaatcccagctactcaggaggctgaggcaggagaatcgcttgaacccgggaggtggaggttgcagtgagctgagatcacgccattgcactccagcctgggcaacgagcgaaactgtctcaaaaaaaaaaaaagtggggggaggctgggcacggtggctcactcctgtaatcgcagcactttgggaggccgaggagggcggatcacgaggtcaggagatcgagaccatcctggctaacacagtgaaaccccgtctctactaaaaacatacaaaattagccggacgtggtggtgggtgcctgtagtcccagctacttgggaagctgaggcaggagaatggtgtgaacccgggaggcagaggttgcagtgagccgagatagtggcactgcactccagcctggttgacaaagcgagactctgtctcaaaaaaaaaaaaaaaaggaaccactgtcatcttagaaaggtgtgctcttgttctggagggcagttagtagtagtttagcaccttttttgtttgtagaattttagaggtgggtcagaaatactaggtgaccttaaccaaaatttaggaagagtatgcaattctacttgtttttttttttccacctttctcccatatcactggtaatggaggaagactcactgccttgtggtgcttgttagtgattagtaggtttctgacaagtgtgggtttattattaggagctgttgtggtggtctgggaagggttgctttaagattggtgaaaactctgcttctttgctacgcagacattgatattgtatcacttctttttttttttgaaagtaaacacgtttcatatcttcaccattttccatccatgtttttggagaaaacgtttgtctcagtgggtattaaaggttgggagactgcaatgataagtgtgtctgaatctctctatggggctgtttgtgagggggttcaaattctgagtgctcatcacacacctcccctattctaaaattattgatgcactgttattgatgggattgtacgggttgatagcctttctatagtgactgtagggctgtattcagccttgtagatccccctagtggtggttttgtaaaggctgtcttcagtgtcttatttcctcagaaaacaactggtatttctcacagctccttctagatttggacaaaggaatgatacaagagcaggtaactaaaagttaagaaaatgggacagttccttcatttttgagttaaagtcttgtggtaatcatttccagcctatcttttacctttcatgaaactttctatgaccacgttgacctgtgtattcattttaacaagtatttaataagcatgtattgcctggtactgtgttaggttccagggatgcttagataataaggtatgttttgtctactcaagtgagcttatactctagtggaggagagaaaaagtaaataagagagtgataataccatgagataggtgctgtgtcctggttgctggtgatgataaagaacacagacctaaggtgggcccagtggtttcagcttttttgtcacctatagagaatatattctttgaccctcttagaacattttttttttcttttttgagacggagtttcgctcttgttgcccaggctggagtacaatggtgcgatttcggctcactgcaacctccgcctcccgagttcaagcgattctcctgcctcagcctcctgagtagctgggattacaggtgcccgccaccatgcccagcatttttttttgtttgtatttttagtagagatggggtttcaccatgttggccggctggtctcgaactcctgacctcaggcgatccacccgtctcagcctcccaaagtgctgggattacaggcatgagccactgcacccagccctcttagaacattttataatcactatatatatgtataactactctaaaaatatggttaaataataatagctaacactgggtactcgtgtgtcaggtcagactgagctaaatgatttctgagtattgtgtcatcattctcatgatacttctacatgggaggtgggattatttatactttaacagatgaagggactgctacctggagaggtgaaggaacttgcccaagaataggcaactaggaggagccggagtaatgtgtgcttgctattagatatttaaacaatggaaaaatattacaaaagactgcaaactccatgacagcagggatatttgttttgtttatggatatatcccaagtactagaacagtacctggaacagaagtgctcaagaaatattttttcagtgaatgaatttgttgaatgctagcccataaagagaaatatttaacagtttggtatctgtttttctggactttaaaaaatatatactatatgtttttttaattttatttttttgaataggcaatacatggtccataaatcaaaatactataaaaaggtatacagtgaaaagaagtgctcccacccctgcccccattcccccctacctcaggtaatcactttttttagtttctggtgtttccttccagggtttctatatgcaaaaaatacatacctcctttcttacacaaaacgtatactatgcatactgttctggaccttggttttttacttacagtatatgattttttaaacatgcatatgatcatagtgtacaatagtgctttgtaacttgctttgattctcttggcaaaaatatattgcagacttctatccttgttgatacctttagttttacctgagaaacatttattatggattatctggggttaaagagatctgtagaccagtagaagtttcaaacttacatttgggaagtttagccagcatatttagggcaagaaagatttatgggtcataactgtttaaaagcagaatacagttggtacataaagatgttatgattgctgattaaactgaagagtcatctgaaaagcaaaagcagtgagtaccaagttgaccagttgtatcctcaaatcagctagcaaaaccagtaagttggtaaaaagatcccagtcattataacaacaaaaaaaacctaaaatgtccaggaattaattagagatgtcaggatttatatgaagaaaatcattgaactttgttgaagggtgtaatataaggctgaataagtgtagacataccaattttgtgccccaaacaatttttttctttttattatttttataacttggccaatgttgatgagtggttgtgttcagttttttttattgatacataatttgttacgcatccttttgattatctttttgtttccataaaatttctaaagaggaactttggaatgggatttataggtcttcagaatatcatcttcatgacttttgatgcatgaacatacttcttaagaggtttttaagaggttgtacatagaaacttgcacaatggatgattattactgccttaaactagtctcaatttaataaaaagtacccatgtaacttaactgatatttacatgtagtagattttttttcaaaggttgacatagggaaagataagggaaatgatatgctggttcttaatgaaaaagggaatgtctttttgtggtctactaattgactgctttaagaagagaacctactgttagttcagtggattgttaagttctggagtagtgttagtttagaagcaataaaggattggttgctaaaggtaaaaagcaaaccttaaaacaataacctaaaaacaaatgggaaggttctgggcagagaattaacattgttaatgcagttcagtttcagttttctttttgtcatacagcagagctaactatttcctggttggttaatggaaagatgttatgctgtatcagctggaatctagctttgcttatgaaggtgtaatcacataggtgaaagatgttgattactgagttttctcacaccatatattaatcaaatactcttatttgggttgggtttctagagggaaatttcagtttgacttttcatttataatttttccgtttggttctaaacctataggggacattacattcagtacacttcatttttaaagaatatgttgcttaacaataattctagatcctgggattggatatctatcagatcccactcatatctccacagtgtgaaattaacaaaaagatatagttaaatactcagtctctatttagaccgaataattgtttttctcagctggacacattttccagccattcggtttttgcctgccttatgtatttaggtgattattcttctaggtttatcaagaaactgaggagtacctttttaggattgttgctggaggctgttgaaacatagactagcttcaaatttgagagtcagattgattgataaaatatatctcatgctgttaccgctgaataaatgacttttgctggtaaagtagtatgcttttaaaataatatgaaaaaattctgaattaaggttagtaatttacactgtaattgattttaggtgttattatattacttgctaataagatttttttttctgggaatagaagcttataaaaatttaaaatatgtttaattttctatatagctccatcaagtatgatggtgaaggatgaatatgtgcatgactttgagggacagccatcgttgtccactgaaggacattcaattcaaaccatccagcatccaccaagtaatcgtgcatcgacagagacatacagcaccccagctctgttagccccatctgagtctaatgctaccagcactgccaactttcccaacattcctgtggcttccacaagtgagttctagaatcagatgtagtcagcaagttgagttttcctaatcattgcttatttatgtgtagtcacttggggggaaactccaagtaagtaaacattaaaagtaactgtagtatctttcataggtaaacaggtattaaacaggtatgcacaatcacttggaatttaagtaatggctttgattataatattgatttaaattaatgatctgatttatactttactattacatgtagcagtaagtagcctcttaagctcccagatatattttggagaaatatttaaataattaacaagtagttttgatccaagatgtttatgaaggtctgtgttaatggaattgcaacctttcttttaatgcggtgttcttattttggtttttctgggacaatattaccttatagtagttgtctgattttctcactgtgcaaagggatcttgacaaatttgttatatattgctcaagatagacattaattaagtcaattttgatataagctaacttctatatctctttttaaaatatatgtgtaattaaaaaaaaaaagtgtttcagaaagatccttcttttctgccatgtcataggagggagaggggctgctaggttcaggtttttgggggcatgatcatatgacctggttctgttacttattttcacagtaaccaaaggtttgatagtttgctgcttggcaaatgaagtagcttttttttcattttttttttttcaattaatcatagagcattgtcttggcatgtgtatggtgttagttgcatgcagttgctaaaggaatttatgtaaacccacatcagaatagatttttgacagctctgggctaatactgtgttagttgctaccgaaagtaccattattgtatttgctttactatcagattagattcaacatagaaattttgatctttggaataaatgggggactgatttctgtaattgtgagttttcaagtgaagtataccagaatttcccctttaattcattacaccacttcaaagcaacatgtttttggtttgctatctaagagatgacagtctcactataggcagcatattctaaatgggtcatataggttaagcacttgagaacccagttccttaatcacttggtgcttctattatctgtctactttttatttaccaaattaggaatatggttgacaaacagtgggtagtgatagaaaataaaagaaggtacattatagccacttgaacgtagattagtgctagagcacagctacctacttctgtttatattatctggagattgaatttctgtgcctttgtcaatgcttactaaagtgacttcattttgactgtgttgtttcctgaggttgaatcctattcaaagattagaaaaagtgatagaaatgaaatgcagctaattttatcctggtatttattgggtagattttaataatcgaataccgtaaatactgtaagttttagaacttgtgtcaaaatgttcccttatgtggtggcatgcgcctgtagtcccagctgctccgggggctgaggcaggagaaatggcgtgaacccgggaggcggagcttgcagtgagcagagagcgagtcactgcactccagcctgggcgacacagcgagactccatctccaaaaaaaaaaaaaaaaaaaaaaaagagggttcccttaggtctcaaaaagtatattgatgaaaagaagttgaactaaaatagaagatttgaaaggctattttacgtgagctgatttagtcgtattgtttaactttattttacatacttagaattgtataagggaagtattcagtatggataactacagtgagtcactttacaatttatgttcttttgacacctgaatattttaagaatttccttttaaatacctgtaaattaaaataatttatcctgtgtagttaatgacaatttttgtaagttagctaagagtattgcctgtagaattgttaaaaatatgaacaaaaccataattaacctttaaagataacttgcagaatctgggggatgagtaggaagggaggttgctaaaatgtcatttttacagataaataatttggggagtattgaaatattctctttagcttttggttttgtaattcttagctttaaggaaatgtgatatgtaaagaaaagaaaaatattccttttctttgatactttgagcaatggtgacatgttactctcttccatctgattatactcccatttagaaaagaatgaggtgatgccagttataaataattataactttagtgctttccaaataggattaacagtcgagttaattaatgctctttaagaaaccaaatttccactttaaaaaaaaagccttaaaaatgtaggacagtaagcaatatcataggatggtttttgaatagaatacaagccaagagaagcttgattctcttggtatattacatacagagagggcaattaatttcttgtacatctgggaatatgatggtgttcttgaaaagaaatgattcttggtttataaaagctcttgaaaaaatttgaaagtagactgatagtttttttgtttgtttttaaccagtaaatggtatattgattggacagcagagctagatctttttaacttcctcatcttcactatcacatcctatttaaaataattttctgctctgcttttctctgtcaaaccctagcattctgccattactagtatcagtgctgatagtgattaatttttcagttttcaacattttcttgagcctggatttttggggtcctaatcagaaaggtccagagagagaggtggatggagtggccaggatgaactgacatacctctgaagaagttaatatgataggccagacgtacagtggtgttttgctggcatttgaaatatgtttgtgaagaaataagccactacaattagttagacattacctaaaatggaataattttgagcttcctcaagttaaagtttgcctttatagatgactgtaggttttttacctgataggccatgggtgagttacactttttgcccatctttatagttgtgcattatcagataaaattggtccttcatttagtatatgaaatcataagatgacatctatgaatgtaccatgttaatgtcttcttgttcctctaggtcagcctgccagtatactggggggcagccatagtgaaggactgttgcagatagcatcagggcctcagccaggacagcagcagaatggatttactggtcagccagctacttaccatcatagtatgtacatactttaaaaaatcttttaaatagttgagaaaaaagtaggcagcctttataaaagcaaattaacccatgtgggccttaatttttagacagcactaccacctggactggaagtaggactgcaccatacacacctaatttgcctcaccaccaaaacggccatcttcagcaccacccgcctatgccgccccatcccggacattactgtaagctcttgtttttgttgtaagggctattttttttttttttttggtagggctttgttttctgttttttaaaaatgtttttacatcttttattcatcctgtgattttgtttcattaaatagtgcttttcagtattttttgtaaacagtattatttttcatagttatcctacctttttattttagaggagtgatgtttgctaaatacatttatttctctgttgctaatgtttcattaacatcacattgatttccattcatttgtttgtttgctttgtatatgttcttagatctcatctgtgtcttgtatatccacgcataatggattgaaaccctttgagtgctaagttctcaaggtttccctcagcgtagtattcagtgtactttggataatgttgaatctatagataactctgtgctggcatgattgggaggaataccctacagataacatgtagtttcaggtagaataggagcattgttcatatggcttagtaaaatcgagagtataactcttatatacattaaatccctttcttctcattataatattaatagtaccaaagaaaacttagaaaatatagaaaagtataaataagaaaagcaaaattaccctgaatcctgctactcaaaaacagccacttctaatattttgttattttccttccagtcatataaacaggtatatgtaaattgacaggggctcctactctatgtgtattgtatatatcttgcttcttttcagttatgttactattttttccatttcttaagagaatgtaatttttaatggctgcctaggccgtcatagtgttgaagggtgctgggtttggacctttaacaggctgtgtgaccattgacaagttatttcacctcattaagcctcaagagtaataatagtagtatctacctcaaggggtgttcgtaagaagtaaacgtaataatttatgtgaggtgtttagcacagtgttttaacacattaccagttttcaattatgttagctatgattccattaaataaacatccttaattaacataagcacttgtttttagaatagacctaacagtttattattatacattgcattataaattgtactgtattggacgttacatgaataattcatttatgatctgtattaaatgttggatataaaattatgtgtaaattgtgtaataatagcacttggcagatagcactgaaatgttagttattaaatatccacaaaagtattaatagtttaagactatttgcttattgtaaacttttaagttcttagacattgcataagcttgttttaaacaattcctaacctataatagttatatttaagtaagatttactgaaagttttagcattagacaacttttagtaaataaaaatggaatttttgttgtcttttctttagggcctgttcacaatgagcttgcattccagcctcccatttccaatcatcctggtaagtgtatttcaaaattgatttcctgtatttagattgatttagtggtgattgaaacgcacaaacacaggctttaatggaattatggggtcacttctcagatgagtacaatactcatcatgacatgagttaatcaacagtttgagtagtcaatatagtcacacatagactgtctatattttattcagtttaactgtccccaaaagaaaagaactatcttttcagctaaaatgagaattacagaaatgctgacttcagcattgaatacataaatatgcagcagaataaaactaggtttcaaaatagaacagctgtaaaactatagcttaaaaagccaggaaagaatcttaagtacatgccgaaaagaaaaataattcactctattcaggatctctggttaactggaatttagaaactatttgattaaattgtatgcaaaagagtaaatcgctaagtagctttcttcagttcaaagtttgtgtataatttttgaaactgtagaggtaataaaacagaaaacacttgaaaataaaatactgaaagtcccttgtaacacaaacatagattttgaatttttttctcatcctttcgtatctgtttttcttagcataaaaagatgcaaatatattacttcagctaatcaccttaattttttggaaactataaactcaattttcctcctaattaaaagaaaattatgaagaattatatttttatttttacttgtttatttttgagagagggcctggctctgttgcccaaactggagtgcagtggcatgatctcagattactacagccttgacctcctagtctcaagcgatcctctcacctcagcttctagagtagctgggactataggcaagggccaccatgcctggctaatgtttgtattttagtagataacagggtctcaccatgttgcccaggctggtctcgaactcctgggctaaagcagtcctcctgctaataattttatttatttatttatttatttatttttttccgagatgggatctcgctatgttgtccaggctggtttcgaactcctagcctcaagtgatcctcctgtcttagcctcccaaagtgctgggattatagacgtgagccaccacaccaagcttgaaaaattaaaaaaatatatttttaaatgattttatttttgatctttgtgggtacataggagatgtatatatttatggggcacatgagatgttttgatacaggcatataatgcatgataatcacatcatggaagatggggtatacatcccttcaagcatttatcttttgtgttacaatctatactctgttagttattttaaagtgtacaattaaattattggctacagtcaccctgttgtgctgtaaaatattagaccttattcattctaactactttttgtactattaaccatcctcaccttcccccaatcccccactacctttcccagcctctggtaaccatccttctactctctgtctctatgggttcaattgttttgatttttagatcccacagataagaacatgtgatgtttgtctttctttgcctgggttctttcacttaacataatacctccagttctatccatgttgtctcaagtgactgaatcgcattttttttatggctgaatagtactccactgtgtataagtcaagcataaagaattttaagcataccggaataatacaggaagttcccccattgtactcattcctcagtttcagccattatcaagtaatgaccaatcttgtttcattcatactcactctctttcttcattctatattattttgaagcaaatcctatattagttttatatgtaaatatcttagtatatatttccagtaaaggtttttaaaacataaacacagcgcccataatgattaattcaaagggtcttaaattcttaaataggtctacataattttctttgtgtaaatgttctgttattgattatgttggtttaatttttcttctagctgtttaaaaaaatagaagggaacatctttgtgtttataacttttctcatattttagtttaagaaatttgtagaatttctagatcaaaaggccatattacagtgacaccagagtgtgagaaccagggttactgtgctggctagcagtagatgtcatagtttaataaactttttgctgatttaagaggcaaatacttgttctggttaggaaaaaggtgatattagtggggcagaagcattcttttaacgatatatatttattatcttctgtaacggattttctgtgttacattgtgtgttgtgattttaaacatttttgtaggtcaaggggtctagccttttcataaactttctttttttgagaaatgtaatatacagaaaagtatgtaacacaagtaagtatatagtctaacatcactaaaaccaatactcatgtaaccactacacagattgagaactaaaacattatggcatcccagaaaccctcctaccccatgaattttgtctctgtcaaaacctctttccttctccccagaggtagctactgtcctgctttttatggatatcactttttttttgctcttttatttattttttaaatttttatttatttattttgagatgaactcttgttctgtcacccaggctagagtgcagtcatgcaattcggctcactgcaacctccacctccaggttcaagccattctcctgcctcagcctcccgagtagctgggattataggcacccgccaccatgcctggctaatttttgtattgttagtagagatagggtttcaccatgttatccaggctggtcttgaactcttggcctcaagtgatctctgccccatcggctcccaaaatgctgggattacaggcatgagccaccatgcctggcccttttaaagtgatgaatacatccctaaacagtctagtaatctggctttacttgttttttttttttttttttttttttgagacggagtctcgctctgtcacccaggctggagtgcagtggcgcgacttggctcactgcaacctctgcctcccgggttcacaccattctgcctcagcctcccaagtagctgggactataggcgcccgccaccacgcccggctaatttttgtatttttagtagagacggggtttcactatgttggtcaggctggtctcgaactcctgacctcttgatctgcccgcctcggcctcccaaagtgctgggattacaggcgtgatctaccgtgcctggccctcattttctttttacctagctttataaatacttgtttaaaacaatttaacatttggactgattgtgtaaagaccacttttaagtgttgttactgttttttgttgtgttttttttggccaccaaaacattgggtaattgttgtcttagacaatctctgtagttttggtttaaccagtgtacctatcagttgtttgctgaagcttcttgtccatagcataatgtgataccttcacattacattttctatagacaatatatatatatttttttaaatttttgagacggggtctcactctgtggcctgggctggagtgcagtggcactctcatggcccactgcagccctgacctcccagacttaggtgattctcccatctcagcctcccgtgtagctgggactacaggtggacacaaccacgcccagccaatttttctatttttcgtagagacgcggtttcaccatgttgcccaggctggccttgacctcctgggctcaagtgatctgcctatcttggcctcccaaagtgctgggattataggcatgagccaccatgcccggctgaaaataatttcataaatacttcaaaactggctttttaagaagacactcagtgaagacacttagtgtatcactggtttttatgttctaagcataatgaaatatatgtaaacaaatatttatctttgtgacaagttcattagagtgacatggcaaaacatttgagtttttaagtttttgaattatccaatcttcatgtgatctgttttgataactcctcattgcattggaaagtattttattgcttggcagcattttgaaaagtaattagggtacatagcttttacaagttgttttcttttaaaaaaattttaagcatcaatcatacttcattttaggttattttttttttttccgtaagatctgggtttcttttttgtcattctaagtaactttgttgaaagtaagattgttgaaagttttattgcttcaaattctagtttaaagttcataaacagcttattgagatacagataaatctttcttttaaatatgtcgaacctatttccaccctggggtctttgctttcgcttcctctttgaaatctgttcagtcttcacatagataaaaggttattcaggtcccatcttttcagatgggatgtcccctaccatccagtctgaagtgttcttcccaatcatctgctgttccataccctgttttattttcttcacagtgttcattgttatctgagttatttcatttgtttgcttatttgtctgcccctgcacctctgtgagaacagggactgtagctgttttgttttctactgtgtatgcagtgcctagaaagatccctagatactctgtagatatctgttaaatgagttaaaacaggaaagccaaataatttttatgtatttgggcttgatgtaataattgttgtttacaaataaaaattagaaatacttgatcagttgtctttgtaaaccagagtagcacctcttttttcccagtgatttaaaattatatattattgttcaaatgagtacactaaatacatctccaaagttaaaattgtggtagttaacatgacctgacttcactaaaaataccttttgctatggcataggtgggacaaatgaccttctacccaagagacagttgagaatctgtgtgtacaacaactgtgtgattagagtataattaaccttaactcagggatgggatagctgacttgcttatgcactttctctcaattagggaatctataaaaatatgtcatgagtcgatgttattcaaggacagttccctggaatacatcttagggtcagtgtgtttttaaaaaataaaagttgagactacatagagaatatgtgtagtcaaatgaaataccatggtaaaataatttattttagattctgattatttctgttctttaaattctcagttgacctggtcctttgaggtaagaaccaaattccagattttaaaaaatgacttttagaacttgaggataagtggtaattggaaattaaaaaaaaaaattagtgttttaagaacagtgctaagtactgagctagaaaatagaagacatggaaattcctaccttttaatgcattatgttattttaatccagttgttttgggtgcattacatttccatctcccctccctttaccctttcttttaggaaaaactgtgttgtggagtgcaagtgaaagccttatatctttctcatgggaggatgttctttcccatttatttcctatagctcctgagtattggtgttccattgcttactttgaaatggatgttcaggtaggagagacatttaaggttccttcaagctgccctattgttactgttgatggatacgtggacccttctggaggagatcgcttttgtttgggtcaactctccaatgtccacaggacagaagccattgagagagcaaggtattgattgtatagtcagatagttactttaaaaaattgagcatagtacattgtcttttattcaaggttatgttttcccatgtacattatatgtgttcttaaatataaataaaggaataaaggtcatgttgaaaactcagaatttgtaagcactccatcttaattgtcggtgtttttgttgtttaacatataatgataaaagatagccttttttatgttagtaggtttctatgtttcgaatagtaagtataccttttgaaattcagtttgaaaattttattttctgtgatcatacatttctacaaattactgaaaggaagtaatattaaatgagaacatgtttctgaaagttttacttataatgttaaaaaaattggtaataaaagggaaatggttaagtaaattatgataaatttttccttttttatacagtcattaaaatgtttaaaagtttatataatgaggctgggtgcggtggctcacacctataatcccagcactttgggaggcggagtcaggcagatcacttgaggtcaggagttcgagaccagcctggccaacatggtgaaaccctgtctctaccaaaaattagccatatgtggtggtgtccacctgtaatcccagctactcaggaggctgagacaggagaattgcttgaacccaggaggtggaggttgcagtgagctgagatcgtgccactgcaccccagcctgggtgacagagtgagactccatttcaaaaaaaaaaaaaaaaaaagtttatataatgaaatggaaatgcttacagtgaaatattacaggaacattccattttagctactgtatgatctcggcttttaaggatgtgtgtgctaaagaacataatcttggctctatcacttgctgtcatgtgactttggcaaattacctaacctctaagccattctgcctaatagaattttctgtgatgaagaaaatgatttatatttgcactgtccagttcggtagccactagccacatgtaactattgagcacttaaattatagctcacttgattgactaatcggatttctaattagttttaatttaatttaaatagtcacatgtggctagtggctatcaatttggacagtatgccttagtttctttatctaaaaaaattagaataatagtacttattgagttgtaagggtttaatgagaattcatactacatgctcctgacacatagtaagtgttgtaaatatgtgcatcattattagatatgaacaggaaaagaaaaaaggaaatatacaaaaatgttaatagctatcttttggttttatgtgatctttatttttaatttttcaatattaagcatgctatacaatctgaactaaaatttaatttaaaatacttatcaagataaaatgtaatttcttttttcttcctaaggttgcacataggcaaaggtgtgcagttggaatgtaaaggtgaaggtgatgtttgggtcaggtgccttagtgaccacgcggtctttgtacagagttactacttagacagagaagctgggcgtgcacctggagatgctgttcataagatctacccaagtgcatatataaaggttagttacaattttatttgaatattttagacttaaagctctatttgttgtcaaaagaattgaaatctgggtggaaggaatggaaaaatgttttatatattaaataataagaaattgtgtttaagtataaaaaacacattttctgagggcatttattgacattatcagtaatctagttttatcgttgccaatttgttacattttgttttttattttatttatttatttatttatttatttttgagacagagtcttgctctcgtcgcccaggctggaatgcagtggcgtgatctcggctcactgcaacctgcgcctcctggggtcaagcaattctcgtgcctcagcatcccaagtagctgggattacaggcacatgttactgtgcctggcaattttttgtatttttagtagagacggggtttcaccatgttggccaggctggtctcgaactcctgacctaaagtgatccgcccaacttggcctcccaaagtgctgggattacaggtgtgaaccactgtgccaggcctgttacatgttttagagtaatacaaaggctcttgaaaatactgagtgaagcctccaaagttgtattcctgtaacttgaaatttgtaagaatcagactctggactttcatcttagccaatcttcaggattttatggaagagaattctaaaattaatagcttttcaaattaagaacctgataagcctgaaatatttttcactagttatatattcaacctgtttgaattttactttataatataacctgtttttgaaagagaaaggcagttgtaattagatagcctaaatatatttttaattgtgtgtcatcctcaacattttcattgtcagtgattgtaaattggtagaattaactgtgtctcataacttattaccaggaagttgcttaggataaaaataatgtagccccatagcatccataaaaatggaattgcctgattacctcacaacagcaaacccagtttctcatttccagttatagttcagttaaagaatgttggaatttttttatatgacacttttaaacatgccaagtatagcgaaaataataaaccacatgtacctatcatccagctgcaacaattatcagcactttaccaatctttaatgtgtttctcccccaacttttttttcctggagtcgttgaaagccaattccaaacagcatagtcactcataaaatatttctgtgtgagtaactcataaaatactcctgtgtaactcacaaatctatacagacttctgaaaaacataatcgcggtgctatttattacacttaataaattagcatcaattccctgttaaaattttcaacaatagagcatcagttatagtctgttagaacaatagaataaagcaataaagtattatatttattgataggatatccatgtgtatagaaaagttagttattaaacaatacataaggcctgatttagtggctcatgcgtgtaatcttagcactttcggaggccaaggttggaggattgcttgagaccaggagttcaagaccaacgtaagccacaaagtgatacccccatctctacaaaaaaattaaaaaattagctgggtgtggtggtgcatgcctgtagttttagctacttgggaggctgagatgggagcattgcttgagcccaggagttcaaggctgcggagagccatgatcatgccactgtgctccagactaggtgatagagtgagaccctttctcaaaaataaataaataaatagacaatacatagactatgatctcatttttgttaaatgatatcatgatatttgttatttgtttatatgtacccataagtctagactggtatgtataatggaattgtctctatgaggtggaaattatttgtattttgcagtttttttccacaagtaatttctgtattggttatttatgctgtattattattatttttgagacagagtcttgctctgtcacccaggctagagtacagtggtgccatcttggctcactgcaacctctgcttccagggtttaagtgattctcatgccttagcctctccggtagctgggattacaggtgtgtgccaccacgcctggctaatttttgtatttagtagagacggggtttcaccgtgttggccaggctggtctggaactcctgacctcaagtgatcagcccaactcagctcccaaagtgcaaggattgcaggtgtgagccactacgcctggccttttgttgttattttttaatggctttggatttccttatatgttttgtagtccattttgtattcgtgggccaagtttgttttgagagaattcactcattttattatttattttttcttcctgtcattgcttcaccctatgtggcaattttgccttaccctggcatctgggattcacatctcagaaccaaatcttataaatttaggaagtagggggactttgtctcctgaggaaattgagttccattctgcaggtatgcttggggcctaattcctgattgcctagatttctctgaaacttttccctgccgtgggcaaatattttattcctaggtgtacttctgaattggctgtattttaccagcacttgatttatgggcaggtgcccacttgtagcccccagagagtttggctgttgtctctctccatattattccaagaagtcaaattcctgttccctgccctttgtttatggtcttggtatacccctagtacctcctatctttagtctctgctctccactgtgggttttatttatcatcagtttggatgtatggattgtttccatatgaatttcatgatcagtttggagaggatgactattttaaatagtttttctgttatttgtatgtggttgaagcagagagagaaggtgattatgtatacccacttaacccatcttgactcagaagtctcttgttttatttatgtaatttaaagtgactggatagagaactatggtgttgaatatatactgtgtgccagatagtatttataaacttaatcagatatggagtagtatttaaaacaattgagcttaaataatgtggaatcgtgcaagtgtaatttcttggatgtcaaatagatacattgtgacttatttatattttggtacagatggcctttgaaaagcccccaaggtgtgagacaagtcatcacttgataaaccactgtcttggacagatcttaatagtgatctcatacttttaccatgaaaagtagataaataccttgttggacaagatatttggaatttaaaaaaatctcatttgtgtatattaactaagattttaaaataattatgtctgtttaccaagtatattactgttctttagaagagtcttactagtcagaaagagacagttacaagtacaaccccatccacaatttcactttccatggcttcaggtatccatggtcaaccacagtccaaaaatattaaatgaaaaattccagaaacaattcataggttttaaaatgtgcgctgttctgagtagatgatgaaatctcactccattctgcttgggatgtaaaaccttttgccagcatatccatgctgtctacattacccacccattagtcactgagtagcgagctcagttttcagattgactgtcatggtctcacagtgcttgtcatccagtaacctttatttagttcataatggccccaaagtgcaagggtaatgatgctgggatattgttaacattgttctgttttattattacctgttgttgttaatctcttactatgcctaatttgtaagttaaacttcattatgaggtatgtatgtataggaaaaaacatagtatatgcacagtactatctaaagtttcatgcatccactggaagtcttggaacatatcccccatagataagggaggaatactgtataccttaaaatttaaccattggcattttcttcattcgtttttttgggtagcagtaactaagggatttgtaagttatcagattttcacaggagatgatattattggggtaaattgtatgtagatagcatgcacccctggaaggagtgcccacactttgagtacacaaatgtgtgcatgcacatacacacacacacacatacacacacacacacacattcccctttttaattaaaatgaggaaaacacacttggagagccataatttcattttataagccaagaagctaggactaaattgtggtttttttcacccttctaagttgactttttttcctgcttctctcatgacatagtagtcattttttacttaacgaaaatctgatgtaatgaaatgacattttacaagctt

SEQ ID NO: 6 - DNA, 2527 bp, Artificial Sequence
  Description of Artificial Sequence:/note = synthetic construct
acctccctccgcggagcagccagacagcgagggccccggccgggggcaggggggacgccccgtccggggcaccccccccggctctgagccgcccgcggggccggcctcggcccggagcggaggaaggagtcgccgaggagcagcctgaggccccagagtctgagacgagccgccgccgcccccgccactgcggggaggagggggaggaggagcgggaggagggacgagctggtcgggagaagaggaaaaaaacttttgagacttttccgttgccgctgggagccggaggcgcggggacctcttggcgcgacgctgccccgcgaggaggcaggacttggggaccccagaccgcctccctttgccgccggggacgcttgctccctccctgccccctacacggcgtccctcaggcgcccccattccggaccagccctcgggagtcgccgacccggcctcccgcaaagacttttccccagacctcgggcgcaccccctgcacgccgccttcatccccggcctgtctcctgagcccccgcgcatcctagaccctttctcctccaggagacggatctctctccgacctgccacagatcccctattcaagaccacccaccttctggtaccagatcgcgcccatctaggttatttccgtgggatactgagacacccccggtccaagcctcccctccaccactgcgcccttctccctgaggagcctcagctttccctcgaggccctcctaccttttgccgggagacccccagcccctgcaggggcggggcctccccaccacaccagccctgttcgcgctctcggcagtgccggggggcgccgcctcccccatgccgccctccgggctgcggctgctgccgctgctgctaccgctgctgtggctactggtgctgacgcctggcccgccggccgcgggactatccacctgcaagactatcgacatggagctggtgaagcggaagcgcatcgaggccatccgcggccagatcctgtccaagctgcggctcgccagccccccgagccagggggaggtgccgcccggcccgctgcccgaggccgtgctcgccctctacaacagcacccgcgaccgggtggccggggagagtgcagaaccggagcccgagcctgaggccgactactacgccaaggaggtcacccgcgtgctaatggtggaaacccacaacgaaatctatgacaagttcaagcagagtacacacagcatatatatgttcttcaacacatcagagctccgagaagcggtacctgaacccgtgttgctctcccgggcagagctgcgtctgctgaggctcaagttaaaagtggagcagcacgtggagctgtaccagaaatacagcaacaattcctggcgatacctcagcaaccggctgctggcacccagcgactcgccagagtggttatcttttgatgtcaccggagttgtgcggcagtggttgagccgtggaggggaaattgagggctttcgccttagcgcccactgctcctgtgacagcagggataacacactgcaagtggacatcaacgggttcactaccggccgccgaggtgacctggccaccattcatggcatgaaccggcctttcctgcttctcatggccaccccgctggagagggcccagcatctgcaaagctcccggcaccgccgagccctggacaccaactattgcttcagctccacggagaagaactgctgcgtgcggcagctgtacattgacttccgcaaggacctcggctggaagtggatccacgagcccaagggctaccatgccaacttctgcctcgggccctgcccctacatttggagcctggacacgcagtacagcaaggtcctggccctgtacaaccagcataacccgggcgcctcggcggcgccgtgctgcgtgccgcaggcgctggagccgctgcccatcgtgtactacgtgggccgcaagcccaaggtggaggagctgtccaacatgatcgtgcgctcctgcaagtgcagctgaggtcccgccccgccccgccccgcccggccccaccccgccccgcccccgctgccttgcccatgggggctgtatttaaggacaccgtgccccaagcccacctggggccccattaaagatggagagaggactgcggatctctgtgtcattgggcgcctgcctggggtctccatccctgacgttcccccactcccactccctctctctccctctctgcctcctcctgcctgtctgcactattcctttgcccggcatcaaggcacaggggaccagtggggaacactactgtagttagatctatttattgagcaccttgggcactgttgaagtgccttacattaatgaactcattcagtcaccatagcaacactctgagatggcagggactctgataacacccattttaaaggttgaggaaacaagcccagagaggttaagggaggagttcctgcccaccaggaacctgctttagtgggggatagtgaagaagacaataaaagatagtagttcaggcca

SEQ ID NO: 7 - DNA, 3712 bp, Artificial Sequence
  Description of Artificial Sequence:/note = synthetic construct
  misc_feature (0)...(0): n=a, t, c, or a
mrnaatcgaaaaaaagtgaagcgtaaaaactaaacggtacttggaaaatttactttgcctgtgtgcgtgcttctgtttatgaaaactacgtttttaagcatttgcaattgatgcaacgttgctttggaaggcaagaaaacaccaagtggaaacgcccgggtggcggaaatcgacttccagtgcgcgagtgcgagattgtgtgtgtttcgttccgtcctctggtgtctggcaccttaacacaacaacaactacagcagcagcagcaacaacaacaatagcaagcagcaacaacaacacacgcacaataataagaaggcctgtgacgttgtcgctgccgtcaccatctaaaggaaaataccaaaacgagtaggaaaacaaaccgcagtgcagtagggaaagcaaaagtcgggtttttttttttacaaaactaggtccctcattagcttgtccctagggttagtgaaacagcctcaacacgaattacctaccgtttgttcttcagcggcgatcgactgtggttgccagcgccccagcgccaggatctgcctctaggatcccggaatcgcccaccaccacagggagcaacatcattaacatcatctacagccaatccacccatccaaacagcagccccaccagcggcagtgcagagaaattcagctggcagcaatcctggccaagcaggacctccgcggcccctacacacgattccggaaccatgtcaataaacacaactttcgacctcagctcgcccagcgttacatcgggtcatgcgcttacggaacagactcaggtcgtaaaggaggggtggctgatgaagaggggcgagcacataaagaactggcgccagcgctacttcgtgctccactccgatggaagactgatgggttaccgcagcaagccggcagatagtgccagcacgccatcggacttcctgctcaacaactttacggtgcgcggctgccagatcatgaccgtcgatcggcccaagccattcaccttcatcatccgcggcctgcaatggaccacggtaatcgaaaggacatttgccgtcgaatcagaattagagcgccagcagtggacggaggccattcgcaacgtatccagccggctcatagatgtgggtgaggtggctatgacgccatctgaacagacagacatgacagacgtggacatggccaccattgccgaggacgagctttccgagcagttctccgtacagggaacgacttgtaatagcagcggcgttaagaaagtgactttggagaattttgagttcctcaaggtgctcggcaagggcacctttggtaaggttattttgtgtcgcgagaaggctaccgccaagctgtacgcgatcaaaattcttaaaaaggaagttattatccaaaaggacgaggtggcccataccctgaccgagagtcgtgtgctcaagtccacaaatcatccgttcctcatttcactcaaatattcgtttcaaaccaacgaccgcctgtgttttgtgatgcagtacgtgaacggtggcgagctcttttggcatttaagccacgaacgcatatttactgaggatcgaacacgtttctatggggcagagatcatttctgctctgggctatctgcattcacagggcataatttatcgcgacttaaagctggaaaatcttttgctggacaaagatggtcacataaaggtcgcagacttcggtctgtgcaaggaggacatcacctacggccgcacaacgaaaaccttctgcggtacaccggaatacctagctccggaagtattagatgacaatgattatggccaagcggtggactggtggggcactggcgtggtcatgtacgagatgatctgtggtcgtcttccgttttacaatcgtgatcatgatgtgctctttacattgattttggtggaggaggtaaaattcccgcgtaatatcacagatgaggcgaaaaatctgttagcaggccttctagctaaggatcccaaaaagcgtttgggaggtggaaaggatgatgtcaaggagatacaagcacatccattctttgcgagtattaactggacagatctagtgttgaaaaaaataccgccgcctttcaagcctcaggtgacatccgatacggatacaaggtacttcgacaaggagtttacgggagagagtgtggagttgacgccgccggatcccactggcccgttgggctccatagccgaagagccgcttttcccgcagttcagctaccaaggagacatggcctccacgttgggcacctcgtcgcacattagtacttccacaagtctcgcatcgatgcaatagaacaagtttacaaacttttaccagcacacatcatgttctgcttcatcacctattactatactatacctataacacatagaaatgggcaaaagaaaacaacagcaagaatatattaaatattaattataccatgataacgaaggcaagcaaagggttttcttgctagtttatatacaccaataataagagaattgaattgatagtaacttatttttgtataatgagaaagggaacgttgaacgaaagggcaacagccgaagccgaggaaaataatttactacatatgattatacacatatatataaatatatatatatatatatatataattatatatacaactaaatataacacttggggcatagcgcttgaagtgattagttaattttaaacgcaaggaaaacatttaaccaagcgacttagagcgacttagtgctaggataaagcatgcatcatcggatcgcatcctctaggggtcgcttaagctgattgattatacagattattcacgcagacagcactcacacagccacttagcatatagcgaacatgaagtttagttaacttgacagcaacaaatcgaaatacacatattcaacaaccgcccccacatgcaacactcgtatatataaattatttatactccaaagaagcaaaaaagaaacagaaacaattacaagttatatataatgttaaaattgcctctaatgtgctgtgctttatgcaaaactacaacaacagaaacaaacaaactaatagttaataaacgagggaaacatacatcaatgcagtttataggcgccaataattagcaagcaactaaaagttatattcaggcagaaacatatttcgaaacaataacggcaacagcaaaatgattacaattgacgccattttttattataattttttacgaaaaatatatatttgtaaatatttataaaaaaaaagcaaaaactcaagagtaaatgcaaaaaaaaaacaaaggatgtatgtgtcgtgtggaaaatggaagtcaccatttgaggccacagaaaaggtttaacctttgacacaataaaaaatgtatctttgtcatttcatttttggcattgaaaagttcataacaagttttgtatacttagagcaagtcagcaaaaaatatatataaatcaaccacaacagacttacaaatagttccaaaaggaagattaaaaattatataaacagaaaaaaaacctaaaagaaaataaagaatttttgatatttttatatgcgcaataaaaacaaaaatcaagaataaaacgaaacaaaaagttattttatatttcgtaaagaaaacaaaataaatattgtaaataaaaattattaaataaaatcaagttcgggaatttcaactgaaaacaaagaaattgaaagcat

SEQ ID NO: 8 - DNA, 46852 bp, Artificial Sequence
  Description of Artificial Sequence:/note = synthetic construct
  misc_feature (0)...(0): n=a, t, c, or g
caggcaagagcaccccgagcaaaggaagaagacgacttgcctccggagctatcactggggagtgggaatttggaaagttccccaactagggacacacgtgacctccttcggaaagtagttccgactgtggcccgtgtatccttccacctccttttgaaccctcctaggtctcctcgccccgcccactcgctgggctgcagcttcctaccgttccgtactttccactcaacccggtaaccccaaacgtgcacggtccggccggggcgcgcggagcctggccccgggcgatccatcctgccgggttttcacgcggccaaggggggcggggctaggtggtctctgagaaccgagcttgactccgacgccgcgaaccgacctggagcccgaggggaaagatgctcgactctcttgggggcaccggagcgggcgcaggagaggcctgcggggtgcgtcccactcacagggatcctctttcagttcatttagataggtgccctttgggcccttgaaattcaacggctatgtgttcacgttcagcacgctcggctgagagctttcatttttagggcaaacgagccgagttaccggggaagcgagaggtggggcgctgcaagggagccggatgaggtgatacacgctggcgacacaatagcaggttgctctttgtgctaagactgacaccatgaggacacagatttgggggaagggggaatctctaggcaaaggctgttacagtcaaatctctgcgaacgattgtgatccgacagcggtgcaaaaggaaagagcgaatgcagtccacgccgcggaatctaggggtagaggcaaggggggagggtattccccttgcagggaccgtccctgcatttccctctacactgagcagcgtggtcacctggtccttttcacctgtgcacaggtaacctcagactcgagtcagtgacactgctcaacgcacccatctcagctttcatcatcagtcctccacccccgccccacaacagcctaccctgcctccggctgggtttctgggcagaggccgaggcttagctcgttatcctcgcctcgcgttgctgcaaaagccgcagcaagtgcagctgcaggctggcggctgggaaccggcccgagcaagccccaggcagctacactgggcatgctcagtagagcctgcggcttggggactcgtgcgcttcgcacccagagctaccgctcgtgccccctcctaccgccccctgccctgccctgccctcccctcgcccggcgcggtcccgtccgcctctcgctcgcctcccgcctcccctcggtcttccgaggcgcccgggctcccggcgcggcggcggagggggcgggcaggccggcgggcggtgatgtggcaggactctttatgcgctgcggcaggatacgcgctcggcgctgggacgcgactgcgctcagttctctcctctcggaagctgcagccatgatggaagtttgagagttgagccgctgtgaggcgaggccgggctcaggcgagggagatgagagacggcggcggccgcggcccggagcccctctcagcgcctgtgagcagccgcgggggcagcgccctcggggagccggccggcctgcggcggcggcagcggcggcgtttctcgcctcctcttcgtcttttctaaccgtgcagcctcttcctcggcttctcctgaaagggaaggtggaagccgtgggctcgggcgggagccggctgaggcgcggcggcggcggcggcacctcccgctcctggagcgggggggagaagcggcggcggcggcggccgcggcggctgcagctccagggagggggtctgagtcgcctgtcaccatttccagggctgggaacgccggagagttggtctctccccttctactgcctccaacacggcggcggcggcggcggcacatccagggacccgggccggttttaaacctcccgtccgccgccgccgcaccccccgtggcccgggctccggaggccgccggcggaagcagccgttcggaggattattcgtcttctccccattccgctgccgccgctgccaggcctctggctgctgaggagaagcaggcccagtcgctgcaaccatccagcagccgccgcagcagccattacccggctgcggtccagagccaagcggcggcagagcgaggggcatcagctaccgccaagtccagagccatttccatcctgcagaagaagccccgccaccagcagcttctgccatctctctcctcctttttcttcagccacaggctcccagacatgacagccatcatcaaagagatcgttagcagaaacaaaaggagatatcaagaggatggattcgacttagacttgacctgtatccatttctgcggctgctcctctttacctttctgtcactctcttagaacgtgggagtagacggatgcgaaaatgtccgtagtttgggtgactataacatttaaccctggtcaggttgctaggtcatatattttgtgtttcctttctgtgtattcaacctagggtgtgtttggctagacggaactcttgcctggttgcaagtgtcaagccaccgattgctttcttaggctatctatatggtctcttcctgagggctattgtccgttaatacagaatacagtacactgttagtggatagncgagctcggtaatccggtctccgtaaatgaacaaaaaagtagacgctttttgaggttgagcatatttcgattaaatcttggcttaggccctagatcaagggtttagatcagaataaaatgaaaattagtgttgcacgtacgcatattgcatcagaatcttgcagtgattgttttagtttcctgagttgcattgatagattcttttaaaatatgactgatttgcataactttagaagcagaatcattttcagtatatatggtgcacattgagggcaaaaagtagttttgttaatgtttaaacttaagttacctacaactttgaactgtatgtagaagttttgtagtttgaagtcaatagtgccataatataccttataaggcgttcttactagatctttgntatattttacctttttctctccctatggggtgangtatgatagtnctngaaantagcacttcagtagcatttaatgttcagtgctcttgtcataaacatagaatggatattgagtagtttctgatcccagatggtaatgtgtaggttcaagggtattgtgtgtagcaagtgaagattgcagaaataaaacttcagttcatgcttgaaatttaagtattgttgtgatgccagaattgctgctcaccgtttttaggtttcaggtcctctgacaccttttggtatcngttaattttactgatttgtgtagaatgtcaggttgtattttaccagctaatatctagaaatgctggcaagaggggtttactccagctttagattgtaangtatgttagcttttttcatacagtgnattaaatttactgagncagntngctgaataagacagaagcccaagaattntaacagngtgtagctttagttgnctaaaagttaggccttagggcttcaaaagttagtggtcatcgaaaagcattaatctttgcagtttcaggnacaacacattggttttgattagggatggggatggggccctctntttgcagaatggggaaagnattgacaggaattgagagctattggtaggccagtgtataanggatgtgaaaacagaaataaggtaatnggtctgaagtgactgaagcatttaggctctatcaaggcctaaaatttggtaatatgagtttggtaatgcgaattgtggcagtggacaatatttagttaaaattatgtaattgcataagtactagcacagtatttttaataaaagttatttcttagcaaatgtcagttgcattttgtctaaaggtagagtgacactacagtgtctatatgtcctgctaaaaattgtggggaatatttttttttaagacagcgtttatatcgggagaggttttattccgttggattatgttagctgcatataaatgtgcacagttaattttgcccaagtttttgttttgaaatgaatgtaaaacttactgaagaagtagcttcccaaaatttagttttctgttaagccaaaaatattattttaaaagagtatttgcaaattttgaagttgacattaattgagaatgttactaaggctaaactggacccgcttgcccagaagataattatggaaaaattcttttgtgacttccaaagcagtctactattagcatgaattactgacagtcatccaaatatataggaacaaaaaattaaatgtttatgtaactttgaaaaaaaagcctttgaagaaaataattgaatgctgtctgggagacagatttctttcagcacttaaagtacataacacactacttttacttttcccacttgattttaaattatcagggttattaagaccttaaaattattttaccaggtttttacatgtgagctgtgacatgactggcattttctttgatttcagcgtatgttggtctctacacatgaaatttgtgtgacttaaaactttctctaaaactgtacttttagttatgatatgcatagaaagcagtatcaaatattgcgtcaaatgactaataacacttaatttctagagttgtggttttattgagccaaaagttgatatgaaaaaaagtcagtaaggaaagtcagtgaagtgcttgcttttttgataattgcactcccaataattntgatattccaacgtacttggnttgcttgnttncacgttaatgctcnctgnttattggagtgggaaggcattaaaattgncattgaagactttgncnttgacatgttgcagtatttattncagtaactaacctgngaaaagttaaatncctttangaaagtagtgattggagtatntttatcngataaagaaagattaataatgaagccatttctccgaggaaaatngaggacaataattcagntctaaaatattatcgcaaaannaaannattctaaaaannngntagnagggttatatgctnaanattagtcngaaatatagngcngaatttgagactatagaaaaantaagtgnanatagggtatgtggaaacgttaggcttctgttgtattttttattgtttggtagatttgcctcttttcaaataaatgttcacagggaatacttttaacttgtagagagtacagtgactattgaagttacctaaattacctcaaggtaagtgattactgaaattaatcatgagggttttaaaaagnattctattcacaacatttattntacattgnttngtatctgctaagntatatttcctgaaaaacatgactggaccacctaattgctgtatgataacttacaaacttcatttttcatagngcttattcaagtgtaaagcacaactgaaaggagtaatgtacagtttatatgaggaaaaaggaattttattgctgccagtgtaaaagtttgcacagcagtatagtcatcaatgctgatttacattgcttataatatactaagtaaatactaaatgattaaagataataaaatatggtgaggtataaccaccttcattttaaacttagttttagaagatagtaaagaaagattcctttattacctttttagaattttatttttaataacatgggaaaggcaactggtgatattttaatttttgtatggaacagtgcatctgctttctcatagccacataaaatacataaacttcttagtgttatgaaatggcttactttttggaagtgaagaagtcttcaattcttattttctaatgttattttgaaatttgcctccatttgctgtttgttcatttggtgatagcgcaacacttaaaaaaatattttaagccgcttctgaagtaatcacttcagtgacttttaatggaggagtatttgttatgggaaattcacttcacaaagttttaacattaattcacttgaagtaaacgtgctatttttaaattttcatctcaatcttttaagtaagacgaaagcttaggaaatcacttttattattgatattgtgtgtgacttcagagtttgtaaagagaattgtagaagtgttgcatgcatatgacaattttctgcttaattgaaatgtgaggcctctgccatactacaaggatttagcttccagaaaatgtaatattaacatagcttaagaaatgtatttttttttttctgtagaaaccgttgggttaaacaaaaacttcccccacctcccaccacccccccaccttttttttttcttaaagatactggcttgttgaagagagaatgggtcatgtcctacaaactgtctgaatttgtccagtttgctgtctcatagtgtcatttagcttgttttatcctatgtatttcctgcaaattaaaatttgtatctgaatccttggtggatttgagttgaagatccttaaccatcatagatgacgctgtgtcctttatattgcatgtcagnagttacatgatctttacttgattcatgatgagnagatggccnctgaaattggncagtgacagtcttttctncccattgttcaattatattcgtctctttacattagnaagtattttgggtagtagnattttggtgctgtaagaaagttcattttctcatcanccactcacctattggtttaacaccatttgttgatctttgagtatatcagtaatttcatcagggtttgcaaaataagccctttaaattctattgttttacattattaattgatgttttttgataaggtagaacttgtgaaatgggactatttgtttgtctttaaatncagtctctataggaaagacaaaataaatacttaaatctcactctttaccatttttcaaagtgaagaactattccgttaaccacctcaaaagatgataaataaaaagggtatttttagttgtttcaactttttttttttttttgagatggggtcttactctgttgcccagctgtgtgctgtggtgcaatcatggtacaccgaagcctcagtctccctgggctcagatgattctcccacctcagcctgggactaaaggtgtacaccaccatggccagccaatttttttgtattttttgtagagatggggttttgccatattgcccagcctagcctcaaactcctgggctgaaggaatccacccatctcagcctcccaaagtgctaggattacagacgtgaccaacaatatccggccttaacttttttcttttgagtgtctttatagactcaagnacttttatttaattcagggtgttagtaccatttaaatgttttctttgatgctcagattatcccagctagtcatttggacctttataccacctcctatgtccatttnatataggccattaatctctataagccttcctccttctcttggaatnaaaaggtatcctaggctcacctgtaccttccctactccagacctggcattaagtctttttccaaggagtttggtaccttttagtttattatgatattagagatgaaaatctgtgttctaggaatgtttattactgctagantaatgttncttttaggccatttcaganaaaagacctagaaaacagatttttacaaacatgaattcatactgatatttttagttttttacattgatttctggttttcaatatatctgctttcttancttanaattatgacccttaaagtcattagcataacttctttgcttatttctncancataaagaaaatagtcctggtgcggtggctcacactgtaatcccagcactttgggagattgaggcaggtggattgcttgagctcaggagttcaagaccancctgggcaacatgatgaaaccttgtctttacaaacaattagctgggcatggtggcatgtgcttgtattcccagctactcaggaggctgaggtgggaggatcacctgagcccaggaggtcagggctctagtgagccatgatcatgccaccacactccagcctgggtgacaaagtgagaccctgtttcagggggaaaaaaaagataaaatagtttgaggaggctggatgtagtggctcatgcatgtcatcctggcactttgggaggtcaaggtgggaggatggcttgagcccaggagtttgagaccagcctgtgccacatcatgagacctggtctctatttaaaaaaaaaaaaaaaagaaaatagtttgaggatatcaataatgatattactagaatcagtaaaactaccaaaagaagtttaaagtttcttcctagtgtttttttgttcttagaatacttcctaccaagaagtgcagtaaaagtgcagtgtccaaatagcccttgtaacaaaacctttctctttctcctgggtgccaatttgacatttaatcagttttgtttctagcagtgttcaatttattagattataagtcttttttttctttatattattctaagatcaaaaatatatacaagatatacacaggagtcctgctgctacctgttcttgctatgcttttccccttttcttccctttctctgtgaagcagccatttttattagtttcttgtttatcactcatgcatgcatatgtttattgaggatgttgacattcaagcaaatatatgggttaacattctttttgtcatccctatacgaaagatatacccagtatactctattgggtgggtttttttccttaaaatattcagtagatctctccagttagcacatagttatcttatagatagaacatatacatataaccttttcttaaactatgctattaaaataatagctttcagtaacttgataattatttttggattgaaaatactactgaaatcaactcaatcatgtgaaagctgcagaaagaaaaagacctagaaaaagggcattggattaggtcaactttgaattttatttggaagataaatgagtccagaagtgagtgggcagagattattggagttggtcttgaaatgaggcgttaggcagattgactgggctggtgtgaaaggtctgtcagaaaatcatgagattagattgaggtacctcaaaaaatgagagctggtatgatgagtgggtaagaatcataaaagcgtagagtgttgatgatttttatagtttataaatggttcttgtgtgtagagttttgtttttatgctagctatagtctgtaacataattcactataatgggcatgctaaatatccatgacagttgacccttgaacaacacagagggtaggggcgcctacccctgtgcagttgaaaattcacatgtaacttttgactccccaaaacttaatatttagcctatacttgactagaagtcttactgatgacataatgttcgttaatacatattttatatatgtgtcagatagcatatttgtataataaagtaagctgcaggaaaaatattaaaatcataaagaagagaaaatatacttactattcattaagtggaagtggatcctcataaaggtcttcatcctcactgccttcactttgagtaggccgaggagtaggagagagaggaaaggtcagacttgctgtctcatgggtggcagaggtagaagaaggtccacatacaagtggtccgacacagctcaaaccggttttgttcattggccaactgtagtttgattgaaagtaataataaatgaagtttctgcctcagttcagtattatcaagtcatagatagcaagggctggaagaaaccttagtagtaatctctttgagtctaattatcatgtagaataggaaattgcggtctagaaaggttaagtgacttgtccaaattacacaactagttagagacatagccagctcttaaatctgacttccagattttcactgtgtcttcttttttctgtaacgtgttgccttttttagccatgaaaaattagaagttgaactcttgtcttttcaggcaggtgtcaattttggggttttgttttgatttttggtttttgacataaagtactttagttctgtgatgtataaaccgtgagtttctgtttttctcatatacctgaatactgtccatgtggaagttaccttttatctttaccagtattaacacataaatagttatacataaatacattgaccaccttttattactccagctatagtggggaaagctttcttttcataactagctaatgttttaaaaagtattcttttagtttgattgctgcatatttcagatatttctttccttaactaaagtactcagatatttatccaaacattattgctatgggatttcctgcagaaagacttgaaggcgtatacaggaacaatattgatgatgtagtaaggtaagaatgctttgattttctatttcaaatattgatgtttatattcatgttgtgttttcatttagaaaagatttctaagccacagaaaaagatactttgtgatgtaaactattattgtagtgctctataatcattttttggcttaccgtacctaatggacttcagggggatacagttcatttgataagaactgaccttatacattacataatcaggtacttatgtgatatcatttcctggactccataaaatgctggtcaccaggtttaatacctggattccattacagtgtganttttgtcttatttcatagttggggattaggcttaaaatcctagagtggatttattcagttaaatttattcacactaagatgtagatgactaatactgtatatttttatgtagaccaaattttaaggtaccactgtgcatatgtataccaactacctgaagaagtatttggttggtacaagagatatagaaaggaatcgctgggtgtaccaaggctaatcagttttataattttgcataattttctaactgcgattatcatttagnttagaacaatttatttctcaaggcccatgtaaatattatttttaaaatatacagncnnaagaattcatggcatattttatgaaaggaggaattcatgtctgatgtgcaaatagtcttaacatattttctaatttcagagcaaaaatatatatgtatgaataaatnaactgtaaattgtcagtaggaaccttaagaattcgtggcgtattttatgaaaggaattcatgtctgatgtgcaaatagtcttaacatatttgctaatttcagagcaaaaatatatgtgtatcaataaatcaactgtaaatngncagtaagaaccttaatggctttaaaagttaaaatttcaggtcaagcattgnggtgtgctcctgnagtcccagctacttgggaggctgaggtgggaggatcacttggcttgaacccccaggtagagggtanaggccagtctgggtaacacagcgagaacccatctcttaaaaaaaaagnntaagnngcggatnatcnccttnacactctttcattagtatctttcctggagactttcaatttaaatacttggtgcttatgacaattagatgttaaaatggatgggaaagtactttgtaacttataaagcattatgcagatgtagactccttttataatagttgtgtaagtatataagacaacctacattcttcatgagctagccataagttttagcaacttgctttgaaccacggtagatttacaattttctgtagtattgagttgtgttcatttagaattttgtaatatttatattgaaaatcaaatttttgtacctacaaaaactacaaaaaatccccctagtttttatagtttctattaaaattatagctggtcatagggatgccagaaggactgtttaagaagctgaaaatagagaaatgaatttatcttctcatagttaggcagggcacagtagaaggatgcttaacattgcaagctgatgggaacagtaggttgatatagcttgtgataacacttctaaagaaaaagcaatgagccatagaaaaaagaaaaagatacattttgaattaaggaagatggtgaatctgggaagtgagcagtacagtcaccagacgtgtatcctctcctatggtacagaagtgtttattgggtctctttatggcctgcatgatatatcccacaagatgacctacttcacattattttaattctgtattcaactaagcactaattcaacccagccagattagtactcataccaaaaaagagtgaatactctgaatagagggcaggttttctgattatggtgagaatatctttgtggtaaattaatctggtgtgctagtttttacgttggtctcttctcagtgtcgttagtcactgaggctgattgatcatcttttaggttactgataaagttcctgtacagctgattttcagaccttagattgcaataacttcaccaagaaaatacttcattgggaagcattttggtccttccatttgattcataactcttacctttatgcctctgaaggaaaagatttatacattcagcttgtaattagtaatcaagactgaggtttagtctatctagcttcacaatctatctagtttgttttgtctagccatatgatttcttcaaatatgccatttcttaaaaaaaaatgttttatgtatcccgattaatatttagccagtggttcttttagccgatggatcttgtcacctcttatgatactattaatagcatgtcaacatgaagaattatctgctgaatataatagctatgctggccctgggttcctttgnctcattcttttttgattgggggataattggccaataaagctttgatagcctctattgcccaggcccctcctcttcttttatgagagaaaggatgaacagtgaccagaaataaaggtattgtttttttctatcaactaaaatggaaataaataattcctaagtaatttgcctgttaggattaaagnctccaagagaatggctgtgcctagtacctaagtgattaatttccttgattggttcacattatattgaggatattagtaatcagtagtgattccttttttggttcaaagatgatagtgtcacagtgaaaaatgtttttaaaatttttgtatacttaatttttctgttaacgaaagtattttcagttggatttttgtttgccctctctattagaatgcccaaagaatatttaaaattttccttttctcttatactgcatatttttcctgtgatttttccccaaacggaaaatactctgcagagattagactttgttattgttgtactacatcattgctttgactaaaataaactcagattgcaaataccttcaagcttacattgctcagtatttttttttttttttttttttgagacggagtctcactcttgtcgcccaggctggagtgcagtggtgccatctcagctcactgcaacctctgcctcctgggttcaagcgattctcctgcctcagcctgcggagcagctgggattatagatgcccgcccccacgcccagctgatttttgtatttgtagtagagatggggttttaccttgttggccagtctggtctcaaactcctgacctcgggtgatccatctgtctcggcctctggaattacaggtgtgagccgncacgcctggctaaattgatcagtattatttaactttgagggatatgatttgntatggaatgcgaagttttatacttgaggnactnagagtccttttgagacaaatatttaacttctcttttgaggttaccgcctacgattgggaattaatgtaaaaaataagccaaaagaaagtgagggaaaagtgaaccaagctgtaatttttttactcttttttattgntgttgttattgntgctgntttttactatcttgattgcaacagtttggcttatatatatagcatttggaattgacagtaagaaagccacatctcatagaagctaactattcccaaattgtttttttcttcttttcctcttactactgctgntttcctcctttcttgctgctaagctcttgtcctgacatgctggtaatatgaaacagtgttttattcagataattgattattctgtaatatgtatgttaatcttttttattacactttaagtaatagggtacatatgcacaacttacagattcgttacatatgtatacatgtgccgtgttggtttgctgcacccattaactcgtcatttacattaagtatttctcctaatgttatccctctcccaaccccccaccccaggacaggccccggtgtgtgatgttccccgccctgtgtccaagtgttctcgttgttcagttgccacctgtgagtgagaacatgcggtgtttggttttctgtccttgcgatagtttgctcagaatgatggtttccagcttcatctatgtccctacaaaggacgtgaagctcatccttttttatggctgcatactactccgtggtgtatatgtgccacattttcttaatccagtcagtcattgatggacatttgggttggttctaattctttgctattgtgaatagtgctgcagtaaacatacgtatgcatgtgtctttatagtagcatgatttataatcctttggatatatacccagtaatggaattgctgggtcaaatggtatttctagttctagatccctgaggaattgccacactgtcttccacaatggttgaactagtttacagtcccaccaacagtgtaaaaatgttcctgttcctncacatcctntccagcacctgtgtttcctgactttttaatgatcgccattctaactggtgtgagatggtatctcattgtggttttgattngcatttctctgatggccagtgatgatgagcattttttcatgtgtctgttggctgcataaatgtctataaatgtcttcttttggaaagtgtctgttcatatcctttgcccactttttgatggggttgtttgatttttttcctgtaaatttgtttaagttctttgtagattctggatattagccatttgtcagatgggtagattgcagcaccaatttnnaggggaattnngacccccattttgaagaanggcntggaananntantgntccaggaanggttnnangggtttaaccccttcnccctaaaactttctcncaaaaagttctcntaagatcngctggaaataagtgtgnaaccncctcccttctttgctctctctcttcctccaactcctgccgcgggacggtgcttgcttcccttgccnttctgccagattgtaagtttcctnaggcntctgattaaccctttcttcttcctaaaagattacccagtctcaggtagttctttatancagtgtnagaatggactaatncaaggggaaatatatatggttaccaaatagcgaattagccatgggaaaaagtagcaaataaataattattttactttttcagatgctaatttttcttttcgtttattttaggattggtgggagctgtccaatgtccttaggctgttttccaaatgagataccaaaagctagttctccatcgggtttctcaggctgctagaagcattcattattatggttgtcattacttcgagttctgttgccgctatgcccacagtagtatttgttacataacaggtgcttgataaatatttgctaaatgaatttttggaaaatacaatctgccacacctttcttctacagtttacaatcttctgttgagatcatccgatagattttttttcttagatattgtacttttgaggcctcaaattgctgtcttttgtattttctatgtctgcagagactttccatctttcactcattgtattcattgttttttaacatctttgtacatatttatagtaactgttttaaagtcactgtctgttaattcaaacatctggttcatcttggagtctgattctattgcctgctcttttttctttgtaataggtcatgtttttctgctttgcctgtctagtaaattttaatcgtatgttgaaatgtagggagtttggattgttacttcctttaagggtgctgagtttcattttgtccaggcatttaaattgatagttgatttagtattgtcaggtttggttctctttgttaaagcaggcatttttcagatttgtcttttgtcctagggcatggtttttaacttcaaggttgccctttccaatgtctcagctaagtatctggggtgttccatgaggtctcttccactttgcctaggccagaactccagcttctcccagtattatatttcgttacctctggcgtcatctccgttatgctttcagatcctgcgcatagacagcccagcccccagccaaggacctgagatgaaatccatacaaaattcttagtcccttgctccacaaactccaacagccttagcagtctaatctcttcctgtttacctcagtgaaatctgtgttccacttgagttccatttccttctgtatcagagaagagccaccatgctgaaagcaaggggcactatgtttctttgttcttaaggatggtagcctatctgcaacaactgtagtgtgatataaaaatatataatttatgttgctgacagttacnaatactgcttgcagtactttgtaacataatttttcagattcaagttcatatactctttttttccacatcacacacacacatattttcagacttcctcctcatccttcttcttgccagtagttgtattataattcctgccagtagttacattataattttggttatatcaatattgagtttttatgggattataactagataaatgccattcatagttaagtgatagagtatattgtgacttttttcctgcatgttttattttttctggacttcacagttgtctctcttttttttaaaaaaattagttttcaatgttcntagctttaattcataaactcacccctaattgtataaatctctcaacatgtttaagcacatttggcattatatcaattttatcttttccaggtgccttntaatctgtcccagtctggactaattgttcttcctggcttgctgtatggctgtctactcaagatgtcccttcaccatcattctagggattcccttttcctctcttgtgggttagattcttcagttcttggagactgtcatcttctttcatggtttcccactcttgttttggcggagcacatctttagtaacttcctgacaaagtgtatggtttgagatttcgctgattttaaaatgcccttattatatagtcacacttgatttatagtctgtcttggtatagaattctagggtgagaagagttttccctcaaaatcagaaggttttgcccaattgttttttagctgctagtattgctgttaaaaaggataatgtcattttgattctagattcttttatgaaacctgtttcttctctggcagcttttaggatcttctgtttctttggtattcagaaatttaatgagatatgtgtgcttctattttggtcttattttcatctgttttgccaggtactcatgcaactttccagtttgaaaactcacatccttcacttttgagtatttttcttgagttatgtcttcggtttcttctcagtgttctctgtttctggaactcctaaaatatatttaacatcctgaactcttagtttttgtttagtcttctgattttcatttgtctttttattctgtatattctgttaattcctcggcttcatggtcttctagcccttcttttgcctatcttatggggttgaggattaaacagtttatatacctgaggtgcttaggatatgtctgtcatatagtaagtgcttgtgttagctgtaattgttgtttactttcataactgtcttgagggaaaggtctttggtcttgattctttgacttcttggctgtacatgaccttggacgagttatgtaatctctttgagacctacctccctcttctgtatagtgttaataagctctagctctcagatgtttgtgagggtcgaatggagtatatatgtgaaaatgtttaatacctttgtacagaattaatagttagtacgtggatctttcaaatatcaaaagttttcagtttgatgggaaaatnatgtctgaattttcagggttatttttaaagagaacttgattatgactgtcttgtaaatctctatgagctaggtatacttgcactaaatgctaatgctttttaaagaagttatgtcttaatattcagtctcattatgttaggttgaagatagaagattatgaaaatattctctgaaaagctctggttttacttcagattgtataaatctgtgtaatgtaataattatttaagaatgacatgattactactctaaacccatagaaggggtatttgttggattatttattttcacttaaatggtatttgagattaggatagtattaatgtaatttcaaatgttagctcatttttgttaatggtggctttttgtttgtttgttttgttttaaggtttttggattcaaagcataaaaaccattacaagatatacaatctgtaagtatgttttcttatttgtatgcttgcaaatatcttctaaaacaactattaagtgaaagttatctgcttgttagagtgaggtagagttaaagatacattttaacagaattgtattcctaaaccgattaagtcaagaagtccaagagcattgttagatcatttagaaagtgtagtgatgaggtaaaacattgttggcacagattcatgttanctgatntgctttaaatganttggcatctagcccatatttgagcccataaccgtgtggtaatttgaagtgtnattnacagtagagcttttgttaaagcactaatagcatnttccanggaggtataattcagagtgaatataaatttgtttatcctgtgtctttagagctattgactgaaaaagctgttagggcattctctaactgtacatcacctaagttatttaaaattgctgaattaggtggcttgtcttgtctaggacagagttttaaggactgcccacctgattgatagagctagttgaccttatctttaactttttgtttttcttttgactttgggagtagagatgtgaaaaggtaaaaaggaaggaaggaagagaaaacttaactctttttgcccatgaagactgtttttccttctcaaaatattgactattttctgatttgtaaaaatcggcacataaaacgtgttattttttacttgacttttatctttcccatgtgatatctataaattatagataggaaaaatttatctgtaatttagtgatctttctagtgtgataaaacgtcagaagtactgagagtggagtggacattgatattgttactcctcantaagtttcactgatttttctcagagtcatgaaaggaacaaacgtttgttaagtccttatcaacttattagataacacanaacatgttgggggggtgtgtacagaggtgagtaagatgtagctcccattctcaagtcgcttacattctaatgtaaaaggtagacaaagcattacagaagaagtaactctgctatagaaggttgcaatgaagagaacattggaaacactaattttaccttataaagaaggtttcataaaggaaggcaagtttgagctggggtgaaaaggaccagtaagggttgactttcaagccaaggagaggaggggaagtgatgttacaggccaaaggaatggcattgtaagaagcttgttggcataaaagtgtttagaatatggcagcgaattcattatcatcagattgtggtgtctgtatgttgggggtgggagagaattgtggtggcaataggcaacaagataacaagaaagtaaaacgtgttatggaaacttaatgggtccagcttacaaatgatctatgcatttaggggtctttctcttttcctgataaacctctcctacaaagagccttgttgcggataccatagtgtttctttggaggaaaataaaaactacaaagctttgtattttttgcacaactggattcagaatataagtaataaaaaaggacangaactttcaaaagctagangccattaaactgagtcacttnagggttngantatcagaactggggatttagaaagtctcagaatggaaatcgaaggacaccaaagacaaattcggcctttttcaaaattttattctagtttaacatattcaaagaaagggaaggaaattcttttcattcctgtgtgtagtgacttcctgctttaagaacttaggacttcagctgtactatcagtattgtaggtcacttaacattattatggttaaagttggcattggagagagcctaggaacctaactgcctgtttgtttttatatttccaaccantggattcccaagttaatgaagtctgtttattagttgagggtagctcttaatgcatatattttaatgccccttcccgcagatggaatcataagctttccaggaatggagagtacctgaaagagtcatttagtccaacttctccattttacagatggggaatctgaggcctagagaagttaagtgagttgaacaaggtcacacaggtacatatggtagccgaccatccactgtttatgccaatattccctttacgttttgcttttttgcttgttcgttttaacctctccaaattttactgacttcagaagtttctagaactaagttatagcatgttttgagttctaatgtcactttccgatcttctttaccttttttctacctctgtttgtatttctggttctggttaagtgagtctggtaagcagcaggtgttctattttatttcttttatttttaggatagtattacatgtgatatatatgtctttgcaaacatacataatttgaagatcttaaaatatttgcactaggcatacccacatttaatagtatgttaaatcttttatagcaattatgatatacatgggtgaagaagagttcctaatatggcctttctgattaactgtatctgtttatatctgtgttttcttcaggcattcataacattaagaatatgccctttctggataactgtatctgtttataatctgtgttttctttcaggcattcataacattaagcaaattcaggtgtactgttacttaattgaattaatcagtttgttttgtacaagtatattttatttttgttccttgttgtataatctggtaggaatggggaaggggagatagtgaataaagagatgtatacttcttgcctttgaggaatttaagttttcactgtataccaattttttaaaggtatttactatatttcagtgcatattttatttgacatactttatcattttgtggtaaacctttagctttactaattttcatctattaagttttcttttgtaagatggtgatagcttcatcaaagagagtaaagaagagacctgcctacctagctgattctatggcaaatctcacttctctggaagcttttcctgttaatcttattccttcagtttctgcctcttgtttcataaaaactcattctttaaatgcttattcatttctcttgtctcatataaaccaatatgaggtactggtatcttttgagttttagttataaggaagcataaatggttaaatttaaatggctaaaccccatttgccatttgtgtatctttaattttagtttgttgagagacttatcactaccaaaccacaaagaatttaaaagaaactgtcagtaggtataggtggaaggaggggcatttatcagagattttaatttaagaagaaagcttcatccttatcctaccaacccccatccctgagcatatttatcattactaagcccagcatatttgctccccatattccctaatgcttacctgtgaagattttcataacttttcccttgctttttactgtcactgttgggtcctggtgatttatgacagatactgtccttgtaggaatgctggnttttactgaattgtactgcttttgaattaaaactttttttnattaaaaagtgggatttgggaccngtngttggaaaagttggcttttgnaaccgggggtnttgacttgggtcctggctctttncatttgnatactgtaatttggggccaagttttttaatgctcttaagtcttagctttctcatatataaaattggagntatancagttatcacgtgattgtgaggatgaancaaaaaaaagtggaactctttgtaaggtgtgttcatctggttgacacttagtagtcattacttccactttccgtccatatagtcctcttaacagtaatatttgagaggcatttttattaaagcagtcttaaggagtgttcgtcaaaccacatgttctgggatcctgagaaagtaggggaagtttagagaactgaagctgcacaaaactaatgtttattttctgttgtgttgtcctgagaccagcttcttagattgtgtttcctagtcctacatctctgattccttataaaatattccattatgaattcttcactattgacaatttctccccttttatcttaaaagtaccaaaggaagtgtaaaatgtggctgtcttgtcagtcctctttttccctgtttttccatgtcaatgggtatgaaattacttggcaagggatgcatatatgtgcatatgtcattacttaaatgcattttctttctnggaaaactcaatatacttaaattgtactaaaaaggaaaagcttgttttgttttgagtggtagtatgaaagttgttttattttaggtctgaccagttagaaaccaatggattgtagtttatttataattagttaaaccttcatgtgaatttggttttgaattacctttaaggtagagaagaaactatatagatgtttttcagggtttctaaatgtacaatacaggttcacaatcacttatttgaaactcttggggccaagtatgtttccattttcagaaattttagttttcaaaaggtagcacagataaatatacttttacataaacaccccagtggggtgtgggtcagtacctgaaatgaaatgttttactcttcgctctaagtgtattaaatattatgtacaatcttattacttcagatcaggatttgctgtagttgagtttgccataaaacttaagagaaaattttagatgttttgaacntctgggatattgaaattggaaatnttatgtacaatcttattacttcagatcgggantgctgtagttggngtttgccataaaaacttnaggngaaaaattttngatgttttgaacttntgggatattgaaattgcagnttangggagntatggacctttatttgttttaaaatgctaagagtttattttaagtaatttttaaaaaatttgttttgcatagtagttggagttaccagggtactgctaaccacactgatatgtaagatctctttctgagccttttattgtttgtaaacatggcctgttaatcattagaaagccagtacatactaacatatcactgctattaagacaaatattagcatactctagtaatgacaagtcagcattttactattctgtattgattttacttattctttcattactctcatactgtaattaaaacttgcaatctgagagactgttgaaaaaggtgatcgttggcttttcaacagggagtaaggtctggtttaaaaaaaaattagtaagcatttggccaagtagattaacaacattcagtttttctttactgtccttatgcttttactactttttaacanatatctnttttgaagatagtttggggaattatgtatgctttaactatgngataccgntactattgaaactagtcagttgtttataggtacttgtaaaattaaaaatatatcccaatagcatgcagatttttcatagaggaaatttgaaagcatggaagcacctgaatttacagtactcctgtttagtggcatccacagtttttaagcaaatgtattagctctaattgcatacacttaatcttttaagctttggttttattattataatatgggggtgataacagtatctacttaatagaattcttgttattacatgaaataattaatgttaaaacacagcataatatgtgtcacattataaagattcaggcaatgtttgttagtattagtacttttttttcttcctaagtgcaaaagataactttatatcacttttaaacttttcttttagttgtgctgaaagacattatgacaccgccaaatttaattgcagaggtaggtatgaatgtactgtactatgttgtataacttaaacccgatagactgtatcttactgtcataacaataatgagtcatccagattatcgagtgagatacatatttatcttaggaattatctttaaaaatttcaaaaattttaatttgactgttgtgttttaggaaaaagtattgcataaagctattaatattgtcaggaggactaaagtgcagcatagactaagaattaggaaaattcctagactaaaaatagtataaggagagggtttacctactatttgaggcagttggtctaatagtaagcaatcacagggagaaagcagaactacttaactcttctgtgttgaggaatgacataaaaggtaggaaaggatataacaaatgttgntaagaggagtctgatggatgagaggagggaactgctttaactgagtttcatacttcagacataagctaattctcagagcccacaaaaactttcacttttatttgtgaaatacaactcagttctcatggcttaacactttaaaccatgagaaaactgaagagttgagaagcttggcagatgctgctgtgatagtcaaaaagaaagtgggtgccatgagctactattgatgtatttgccattgatccctcctgaaaatctagaatggactttcagacaaatggtttgaaaattctaaatcactaatgattgagatttagtataggtttactaagaacgggttttttttgtttttgtttttggtggatttaggctgttgcttactaagcaaagcaggctttagttgaggtttatcttgctttaaacagatatttaacagattttcctggaggtttttgtgtaccactgggaaaatgaagttaggcagatgactaagtgaaagctgtcctgctgactccttataatgatagtcattgtctaccagaagatctctcctgtcacaccaaaggataattgattatatcctgtaccatattatgagtcacctgattggagatataagacatacttctcacatatttagatgacacaggttagtacattgaatatcagccagggtttttaaggatcttaatagagtgggaactaaggtaggaaatatttaagagcaattaatagtgtatatctatagtcctgtttctaaaacaagtttttttttaaaacctcaaactctgactatagtgaacagagaagtcttggactcttacaattcatgtgagaagacctgaaactttgataacaattatatacattttgtgagtaatttctttggtgtatgccttcacatatctctggtatgtgacctatgctgcagtccattgagcatagattcccagaatgtattctcctgcagaaaatggaggaaaataatacttggcttccctaatgattacatgtgtatacaacactaacatttgcaagaccacctttaaataacacacttagcatttttattttatgaaatgtaatatgtagttctttgcatagtttatcctattagtaatctattctgtctttggaatatgttttgtgatgatgaaataaatactataaatagtattattccttttgcattgagagtcctgacgaaatgtccatgtgacagttcattttgggtttagctctacctctaatatgtgacctatgctaccagtccgtatagcgtaaattcccagaatatatcctcctgaataaaatgggggaaaataatacctggcttccttaatgattatatttaagacttatcaagagactattttctatttaacaattagaaagttaagcaatacattatttttctctggaatccagtgtttcttttaaatacctgttaagtttgtatgcaacatttctaaagttacctacttgttaattaaaaattcaagagtttttttttcttattctgaggttatctttttaccacagttgcacaatatccttttgaagaccataacccaccacagctagaacttatcaaacccttttgtgaagatcttgaccaatggctaagtgaagatgacaatcatgttgcagcaattcactgtaaagctggaaagggacgaactggtgtaatgatatgtgcatatttattacatcggggcaaatttttaaaggcacaagaggccctagatttctatggggaagtaaggaccagagacaaaaaggtaagttattttttgatgtttttcctttcctcttcctggatctgagaatttattggaaaacagattttgggtttctttttttcttcagttttattgaggtgtaattgcacaagtaaaaattatatataaatacaatgtataatatgatgtttggaatgtatgtgtatatacattgtgaaatgattactacagtaaactactaacatattcatcacctcacataattattattctccccccagggtgaaagcatttaagatctacaagctacaattttcaattatacaatgttattattaactatagtcactatgctgtccagtagagcttcagatcttgttcatcttgtgttcctccctccccaccctcagtccctggaaaacaggttttaaagatagttgctaatccttatttcttctaaatttttaaatcagttgctgcctcaatttctatatgagaaatgactgattgatttcatttttctgttcacgctaccattttcatatcatactagcacatgttacccattaactgtattgcagatttggtctcacaaaattcttctaaaataacatttttaaaaagcatattaatcaaaaataagctttatatttctgaagcttgtttgagcatagaatgcctttggataaaataccattacctagtaaagtgtgaacttttataatccataaaaattattcttttataagaatattcataaatggagttagattaatagaagattctcgattctttggatcagaaaactaaggactatattgaaaaatcagngacaaatttaattcttatagtacatctgaaagaaaaaagaaaactcttgggagaacttttacagtgatttaattttgctgttgatatatttctttgggtggtaagtatggcaaaacatgttaaaatttaatgcaaagagattttgtacatttttccatctctaagaaggacaaagcctaagcccctccagatagatagaaaaactcatttagagagttctccttcatgttaatctaatttcttcttaattcagctgtaaaacagaaatagaatgatcgtattaatcatttaaagctgtgtaattgcatagattccttgttcctttaccccctcttatatcttgnttcctatcctttgtgacttttttttgcattatatataaggatgccgaaatactgtttattgttgatagtttacaaaattgaatcttacattagtgcataattttggtgaatgttgaagattatggtagattgccttacatttctgcatattgtttgcaccttggaatgatagcactggcatgaattatagagctgaggatctaaagatttttactttgatttatcccattatcatctgcagggaaacaattgcttttactgattaaaaatgcaggctgggcacagcggctcacgcctgtaatcccagtactttgggaggccgaggcgggcggatcacaaggtcaagagatcgagaccatcctggccaaccaacatggtgaaacctcatctctactaaaaatacaaaaattagctgggtgtggtggcgcgtgcctgtaatcccagctactcaggatgctgaggcaggagaatcgcttgaacccgggaggtggaggttgcagtgagccgagactgtgccactgcactccagcctggtgatagagggagactccatctcaaaaaaaaaaaaanatgcagtagcaaaagcgatggtagaaatttaaaacagagttgatgagcagcatatattttggtagtggaaaaaaaggtnaaaaatttttgtaataaaatanaaaaattttgtaatgtggaggcgcagaacactagatttaagccattgggtcttaaattgtgttacattccttttaanggctgntttaaggtataaatgntctnccctcaaaaaatgtgcatagtgtacataaaattttgcagtttttattacattgaaatatattcttttagacagaatgtaaaagaaccttcatgaaaactatgtcacttttttatgcaaaaaccagtggctactacatgagagcaatgaataaatctaagtggtacaaattaaccaaaattaagctttagttctgttcaatactaaattttaatgaaaagactgctatttaacttttaaaataacaagttgaaactatgctctttgactttgactttgcaacttttatatgatctttgatatccaatcagtgttgactttggtaaaaagtgctgaaaatgctattttacaaaagaaagaagagtaaatggaatctgtagattctattgcctgatgaaagtagacgtgtcaagaaataagaattctccaaggctcttcagataaattcatgtttcatcattttctttgccttcaagttactgagatcatttttggcaagatctgtatcattaatgctgtgttaggaaagaaaagattatgactccacattttactttcaaggttgaagagttaaactgtttaaaaagagtgtatgttatcctgtaaacagcagtatcaggctgtagaatttgtcttctgaaagcagggaacttatatatagcaaagaacttcatagtgctcccatttcttgacaaaacctctcgagaagctcttgattgaaagtcttggctttcatgaatctggcagctttcacaatagtggatntttcatgacaaatcatcttacacagggaattattcaagggttggcacttgaaacagtagaatactttcacaacaagagataagatttctttcangattgatgacagncttgcaccctagcgcatactgatgaagagagcantgggtgaccatgacatggagagcttctgtctttaccagtgccccaatatcagatgtgttgtctggcagtaaggtgtactgtctgcctacagaatactgaggtttcttcaggagaagttttttggtaaagaaactttaccattttgaaagtgttaatgttttctgaagcttccaaaaagattccaaaatgggaatgtttccttgattgtgtcaccatgcttgcatttgatgaaaacttgtagccggctatactgagaaatcatatctgaagaaaggtggtacttccaatctttttgtgacctactttattattgnttttttaatgtcagggttttttttggaatggagaaaagtatttgatagaggtattgcaacagtcttattcttcttcatgctacaagtatatttgactctttctaagatacttgccttcactgttcaactgtgtgactttttgtttgtttagcattacaatcaatatcctagtaggatgatttaatcaatgatttttttttttaaaaaaaaatcttgtttcctatcctttgtgactttttttgcattatatataaggatgccgaaatactgtttattgttgatagtttacaaaattgaatcttacattagtgcataattttggtgaatgttgaagattatggtagattgccttacatttctgcatattgtttgcaccttggaatgatagcactggcatgaattatagagctgaggatctaaagatttttactttgatttatcccattatcatctgcagggaaacaattgcttttactgattaaaaatgcaggctgggcacagcggctcacgcctgtaancccagtactttgggaggccgaggcgggcggatcacaaggtcaagagatcgagaccatcctggccaaccaacatggtgaaacctcatctctactaaaaatacaaaaattagctgggtgtggtggcgcgtgcctgtaatcccagctacttcaggatgctgaggcaggagaatcgcttgaacccgggaggtggaggttgcagtgagccgagatcgcaccactgcactccagcctgggcgacagagcgaaactccgtctcaaaaaaaaaaaaaaaaaaaagaaaaaagaaaattatatagaaataaaattccagctattccaaaacttgcaccttgaatacaggtacagaattgctaaaaccgtgtaccattttgtagttttagcatgcttttgtgtaactgcatctggtgtttgatcctcatgagagccctgttaaggaagggtacatattattgtcctcattttccttcgaaaacacatcagagtttgtattttgactgtcagcattcaaatacaagtcttttatttataaaattttggtctttatactgtggctaaaaatcttaaatcacttgtcatgatttgaaatggtttataccgattttttttgacatttatacacacatacacatatttttaattgtctataataaaatcatgctcatctttgaaaaaatattaggagtactacagtggatacctacatacttgctattcagcatacctggttttttgtttgttttttgagacagtcttctctgtggtccaggttggagtgcagtggcacgatctcagctcattgcaacctccgtctcccaggctcaagtgattgtcctgcctcagcctcccaagtagctgggactgcaggtacacatcaccacgcccagctaattttttgtatttttggtagagacggggtttcaccatgttggccaggctggtctccaactcctgacctcaagtgatcagcccacctcggcctcccagagtgctgggattacaggttgtgagccactgcacctggcctgtttttaaattcacataaatatgttttatatttttcattagggagaagaaggttgtgtctacaatttttaagacattggggagatttagatgccagtagtaacttaaaagagaaataattgcaaattctttttcctcttgagtatactttcatttaaggtacagtgttctgtaagttacttttaccgttaaacttcttaangaagcttattgtttgtcttacatttttaggttggatttttcttaagtcacatgtctaataaaaaaaacccttaaatacctcatttattcgtcttcgttagtgaatgcattgttgtacatattagatttttctctttagataactcagcttcccctattaagtgccacatgtattacaaaattttatttatgttttattgtttaataaactcttgagaactagatacattttaatcatttgtaatacttacattttctaaaacacttcatttttccctggtttcttcaacaaagagatgcatgtagtacaaggatagctttacctgtgttagaagattgtttcacacatttacatcaactgcatagtcctgtttttgttgggccctaatgccagcatcactttttgctactgctgtttctgccttaaaggcaatatgcctctgtctagtttgctgattctgatactctttcccctggaaagtaggtaatcaagtttgtgaggagctgtgtgtttaaggagtccataaatccttgtggggagccctaggtgtatagagcatagctgtagggcagaggcctttgacacttattctggatatgcagtggcctttgcctatggggttcatgggtcagagcgctgttgtgacctttgaataaatgggttgttatgataattgttttaagggaggagagttattctgatatcctttgtattgatattgctcttatttattattgagctggatttaagtattaatcatttaaggtcaaatgtctaatgtatatatgttcttaaatggctacgacccagttaccatagcaatttagtgaaataactataatggaacattttttttcaatttggcttctcttttttttctgtccaccagggagtaactattcccagtcagaggcgctatgtgtattattatagctacctgttaaagaatcatctggattatagaccagtggcactgttgtttcacaagatgatgtttgaaactattccaatgttcagtggcggaacttgcagtaagtgcttgaaattctcatccttccatgtattggaacagttttcttaaccatatctagaagtttacataaaaatttagaaagaaatttaccacatttgaaatttatgcaggagactatatttctgaagcatttgaacaaattaattagctttgttgttcaactcattgggctaaagaagccaaaagcaatgggttttaatgtagtcgaagccaaattatatttatgaaagaaatattctgtgttataaccaccaaatacagcccaattctgactagatgatggaagaacctgtcccatcagaggtccagcatgaggtccagcagaggtccaccagaggagttcagcaatttgctgctcttagggcagggatcaattccttaatatcttaggaagactaggtattgacagtaatggtgacaaagcaatgaaaaggaaaggaagaagtgataagacatggcagcaagctgaagtatgatgagtaaagaataggaatcaaagtatgtggagtgttagagaaaacctggatttagatccagattctagtcctatctctgtcattaatctattgcgtaaccctgagcatatcatctacctctctttgagtttgcttgtcantaaaatgaaagagactttgaaatctgagacttcctggataagtactaaatacagattatgtcactgatgtctgcctctatttatttctcccttttaccctaatctctataagtctacctcagtcatcctgatcctattctacttctctgatgttgttgtcagataggtgtgatcatcctcatcagatcttttctgtattcttagagacagataactttatcaaagaccacagatttattagtatagcatgttaaagtcttctaaagagtctcattgatgctcttttcatctcagtacaatttttaaaactgctgaatgcaaggtactgagctgttggaagtgactgacagatgaatgtaacagattcatagagaagggaaaaaggaagaaaaactcatgctcttcctatagtattgatatcagtgtaagagccaagagaaaggtataaagtatcatgcagatattaaggggaaangaaaacattcactttagtaatctttcctcattttctagtttcctcttatgtactatgatttaatactgtagtaaagttttaataaaatatgagctatatgtaattaagtgggaggttgtggggctaggcacgaggctcacacgtgtaaccccagcactttgggaggctgaggcaggcggatcgcttgatctcaggagttcgagaccagcctggacaacaaggtgaaaccccatctctactaaaaacacaaaaattanctgggcatagtggcacacacctgtantcccagcttcttgggaggctgaggcaggagaatcgcttgaatccaggaggcataggttgcagttagccgagatcatgccactgcactgcancctggacatcngancaagactttgtcttagaaataaataaataaatataaaataaaataaatgggaagttgtgtatataaattataaatgctacattcagaaaagcttttgaaggttgtcagacagtttcttaaaggaagttcaccagttctttattgaacattgaagaaaacatacagtttagactggcattaaaactgaaagaagtggccagacgcagtggtagacgcagtggttcacgcctgtaatcccagcactttgggaggtcaaggtggatggatcacctgaggtcaggagtttgagatcaggctggccgacatggtgaaaccctgtctnttactaaaaatacaaaaattagccaggcatggtgatgcgtgcctgtagtcccagctacttgggaggctgaggcaggagaattgcttgaagccgaaggtggaggttgcagtgagccgagattgcgtcattgcactccagccagggcggtaagagtgaggctccgtcttaaaaaaaaaataagtaaataaattaaaaactactgaaagaagtattacaggcaatgggaaatagcttgagtggaagtgcagcagaaggaaaaagctggacaagaatgtagtgtcagagaataggtatggaacgtgtgagtgactgttagaggatcttgaatggggataacagacttgatttcataaatactgagatgtcatgataatacttgaggactaaaccatgttttaaggacagttgtatgcaaagttgtaatcgcaagaggaaaaaatagtggaaaagaaaccagtaataaaacttgccttaatgcaggtatgctaagacaatcaaatgggatttcattaattttttatttgccatttatagccaaagattttgtaaaagttttgagcccagtcaggtgaaatagtctcagaaagaaagaaaagtgaatctgagacttggagacattaatgttgatattttggttttaaacgtgttttaaatccggtaaaagtgagcttctcacatgacaatannncagtgggtacttgggagtatgggttcgaatctaggtaggagatatatcgatattttgggcatcatcaggaaagggagagtagttaagcctttcatataaataatggtgtggcgtttgtgcatgggangtcttggaggaaaggaagaaaaggagagggtgaggactgagataagaatggcaacttgggtttaggaagaagaagaggaatcaatgtagagaacagatagtgctgaaaaatacagcatcttctgtagggattggcagctttttcttgatttttgtcttaatatttctaagagatggaaaaagctactatattctagacatttaacagggttaaaaatgttactaaaagatgatcaatgtggttttcattcaagactataacaatatgtatatatccaaggaaatttaattctgacttaaaaaaattgttttgcttgtatagatttagggacacaagtgtaattttgttacatgcatagagtgtatagtttcaagtcagggcttttaggttgtccatcatctgaataatatacattgtacccattaagtaatttctcatcttctactcaccgtttcaagtctccactatttatcattccattctttacattctgattttcatttactaggtgtattagtctgtttttgcattgctttaaagaaatacctgagactgagtattaaacaggtttaacctgttttctttatgaattcttctttaattggctcatggttctgcacgctgtacagaaagcatagcagcatctgcttctggggaggcctcaggaagcctccaatcatggctgaaggcaaaaggggagcatggtgagaatgggagcaagaaagagaaggagtggtggggagaaggtgccacccacttttaaatgccagctcacttaccaccaagaggatggcccaagccattcatgtgggatctgccccccatgattcaagcttcttcccacccaggcccccacctctagcactggggattacaattcaacctgagatttgggagggaaagatatccaaactatatcactaggtctggatcttgttatttattttttggaacatagtcatatatatccaaggatatatattgtagaagtccacagaaccatactaatgnngganttctgcttagctaggtcttatctatctgaaacatgatattcatattgcagagaagattattttctttagtgattgaggaaatctttactacttatacatttttaatataatactataatatttgaagatgcacattttagatgtagtttaattgaaacctggaaatactnttaatttgctttttaaagtcctaaaatcaggattatcagattctgaattaatggagtttaaatcaaaaagattacaaggcagtttttcagttttattctggttaattttatcacagctttgggaacctactttgtttatttgcttctttgaagttagatttccccagtgaaatttcaggtatcacataaagtcttatgaaatggctcattgcactttgaactttgagtcaaggaagtgaaatttattgatagattgttggtgtaatatttatcctgtttgtggtagcttttttgaataataagtgtcttagaagaccatgttggagtagcctgcatgcttttatcaaacatattaattatgtgatggctgatactgctttagatattacatagaaatagtagtaggtgtttactaaactggaaatttcatttaacttggtttagctttgccttgttctcagtcacattgataaaaatgtaagacttntgtttatcttttagaataatgacaccttttggtgctgagaattttttgttttatatatatatatatatatacgtaatataaatacaaaatatatttaaatatgtataatatttctcatacactttatgtaactttgtgttcctgtttctctattatcttggcatgttttcttcaaatggcacttcttaacctcctaaggttaataaatttctttgtaatggacttttgttttctaattcctcagcgtatgacaaatgaattatactttgtcaaattatttaggtaactttcagtttttgaagtcctgggatcataacattcatcagtctttaatttctgtcattaaggtcattagctataaatgaatttatgagtagatttaaaaaataaaacatacaatccttcccttaacacactttcccaccatttggttcaactgctagtgtaaaagcatgatgaattttgagaagttatattttaccagttactttattttttaccagttatttaaaacagacatgagccaaagccagaatacttgttaatgaaaatgaggtgttttggaggaaaggaaggttgtgctgcagtttttacttgaaatctgttacatttctttacagaaatttcaaatctcttgtttcctgttatgatggtggcattatatacctttaaaatgtgagctataggaaaatgaatgatggttaattttttaataaatatttagacttgtgtttttgaaattttttataacattgttataggttttatcctctttctcttgtgaacatgtagtggnntgtattntgtgatctttgccgcatgctagagacttaagaatactatagcaaatatctgtcttcgcttacatttaaaaatttttcgtgactactccctgttgatatctgtcttaaaagttacttttgatgtagttcacaaatgtaccagataattatttcatcgtttttaatgcttaaagtttttatttgtattaggatttttagtatgattttaatgttaaagttttgaagttactctgccactagaagtctaattttgggacttactattcatgaaataggaattgacttttatataagtaataggaccttattttgaaggttcaaactggagaaaatcttacattgtttatatttttatttcatttatttcagttgatttgcttgagatcaagattgcagatacagaatccatatttcgtgtatattgctgatattaatcattaaaatcgtttttgacagtttgacagttaaaggcatttccctgtgaaataatactggtatgtatttaaccatgcagatcctcagtttgtggtctgccagctaaaggtgaagatatattcctccaattcaggacccacacgacgggaagacaagttcatgtactttgagttccctcagccgttacctgtgtgtggtgatatcaaagtagagttcttccacaaacagaacaagatgctaaaaaaggtttgtactttactttcattgggagaaatatccaaaataaggacagattaaaagctatattttattttatgacatgtaaggaactataatttgttttctattagatctgccaggtgttttgcttactctggcattggtgagacattataagggtaaataatcctgtttgaaggaaaaggccttatggcattgtaacatgagaggaatttttcttaacaaggatggttaactgagaagaaattagcatgggaccaatattttaaaaattttggtctataggtagaaatgagatctgttctgtggtcttatgtagtgacacaaaccactttttctccattttggcttatgtttctttttctttcctttttttttttttcctttttgttagagagagggtcttgttctattgcccaggctgagtagctaagactacaacatntgccaccacacccagctaattttttttatttttatttttgtagggacagggtctcactatgttgcccaggctggtctcaaactcctgggcacaagcagtcctcacgctttggcatcccaaagagttggaattacaggtgtgcgccatcatgcctggccttaacgtttcttaagacttgattattttctatttagcttctgtggatttacttgattaatttttttaataggagagaaatcagtatgaagaggaagtaataaagaatgaaaacatggtatttaaatgtgcaggtttagaaagttaatgaagtttgaatttgattgatctgtatttagagaaggcaacgtcttattattttaaaaccaactatccgccctgtgcggtggctcacgcctgtaattccagcactttgggaggctgaggtgggcagatcagctgaggtcaggagttcgagaccagcctggccaacatggttaaaccccatctctactaaaaatacaaaaaaattagccgggtgtggtggcaggcgcctgttttccccagtaattcaggaggcttggaggcagaaaattgctgaacccgagaggcggaggttgcagtaagccaaggatgcaccattgaactccagcctggggcaacaagagtgaactccattcaaaaaaaagaaaaaaaaaacaacaactatcttcatttaaaatattaaatgtgaatatttaaagtgagactaaggtgcaacatttttagatagtaatgaagaaaaggactaactttgtagtgttgctgccttgttaaacatactagatagcatattgccaatctttaaacattctcaatgataggatttattactttttctgatttttagcttttcttttgaaagaaaataagaggaagtttcatttactgcaaaattttaaatgctgctttgatgtatcagtagagatataattttcctttatccagaatccaagtagctggaaaaaaaaatcaaaatatgctgaacttttttttttttagccagaaacccatttcctatcgtctgtacaaataaaagttaaatatatctcaataacttagaaaaattattttttgataatccaggaagtattagcaactgttttaaaattaagataactagtaagttttatttagctttcaaaaataggcatctacatcatcatctctgcatacctttaggaatttcctaattcttatttcccttcatctgtactttaacacatgcaaaattgaaggttagattaaatatttatgatttatttgtttatcccttgactacataaattcccattttattgattttccntgccttatttaagaatatgctatgattaaaacacaaaaaattttngtataacccatatatatatagaattcacctttttgttatttaaatattattggcttattttcttctaagtaaaatacaattactggctaaaataattgaaataagcaaaaaaaaaattttaaagaccttgtatacaagattactttgccaggtactgttaaaagatgcaatgacatttaagacgtaacatccttaaggatcttattttctgggggataaaaaactttaaggtaaattagaataaaagatttaaatggcantttaaggtaccaggtaccagataagatgtcacaaggctgtatatcattaattgccaaatgatttatacaggccagatttctttgttggtccattggaggtttaaagtgatgacttctgttgtgtttttnttattaagaaggtattatcttattagtaggaagtgattttttttaagaacaagcattttataacatcaaaagaaatcagtagtactctttcctaccccctcatatttattctgaaagtattcaagcattatattgtcatgtaagaaactggagcttctcatgtttgtattgctgtagaagtaaacatgtatttgccatgcgtcatcagggaagttgcactcaccgtccaagaacttttgttaaagtaaatcttggaataggtagctcatttgaaatgtagaaaaaattaaatccatatctgaattttgtttatatgtatgtacacgtaaactaaaaacgtatttaaagctagtattagatgagaaaagaggtttttttacttaaaattttaaggcaaaagtagtttatcttagatcttgtgagattgtatttttggtttaaaatttgagaatttgagtgaagaaaaatcatgtgaatgaaaatgcaacagataactcagattgccttataatagtctttgtgtttacctttattcagaatatcaaatgatagtttattttgttgactttttgcaaatgtttaacataggtgacagatttncttttttaaaaaaataaaacatcattaattaaatatgtcatttcatttctttttcttttcttttttttttttttaggacaaaatgtttcacttttgggtaaatacattcttcataccaggaccagaggaaacctcagaaaaagtagaaaatggaagtctatgtgatcaagaaatcgatagcatttgcagtatagagcgtgcagataatgacaaggaatatctagtacttactttaacaaaaaatgatcttgacaaagcaaataaagacaaagccaaccgatacttttctccaaattttaaggtcagttaaattaaacattttgtgggggttggtgacttgtatgtatgtgatgtgtgtttaattctaggagtacagctgatgaagaacttgcttgacaagtttttaacttatgtattatttcgaagcagtgtttacgtagcagtaacatgaaagtttctaataaaatacccaatgtacacaagcgtcaaaaaagctgcatttttccttttcctaattctttgttgtttgctgaaatctggggcaaaggtgcgcggagggggctaaatgactgggatatgaagtaggaatgggagaggaaagaaatagatgggaactcaggtcatttgggaatgattcatatggaatgtttttactgcttccactcctgtctgccttccaatttattctcaatccctcagagtgatcttaaaaatagacttgattgtgtcacttctgtttacactttataaggaccttgtgttttttttttttaccatgacctacaaggcccagcataatttagcacagggctacctcctacatcagcactagtcaccttctctccttgtttcttgagattcagtcatactggtctttcttcagttcttcaaaatgctaagcttctgcctcttctagtctttccagttattttccttctccctgtaccttttcatctcagccttttcccctgaccttccatagctatcttcatatttccagccttagcttcaatctcatattctctgaagtcctttgattgtcctcccgttattctttttttaaaaatcctatttccttatattgtatcttagaattatttggtttgtttcatttttgcctatgtgtgatatatgtatttccacataggtatatatatctacttatagacaagaattcttcagattaaaaaaatctgatttgtaaacattcccaagtggntgtttaccatttttttcttcccccttcttattctacctgattttcccctgttcattcaccacactcgtttctttctcttttttactctctcttaatttttcattcaatttttataacatgtaataaatctaactgtagcgtctgagtattaagaatattgctagtaatacttcacctgtaatcccagcactttgggaggctaaggcaggcggatcacttgaggcccaggagtttaagaccagccggccaatatggcgaaaccctatctgcactacaaatacaaaaattagctgggcatggtgtcgcacacctgtaatcccagctacttgggaggctgaggcacaagaattgcttgagcctgtgagatggaggttgcagtgagccgagatcacaccagtgcacgtgcacttcagcctgggcaacagagcaagactctgtcttaaaaaaaaaaaaaaaaaaaatatatacacacacacacacacacacacacacacacacacacacactattactaccaatatacatacatatatgtatgtatgtatgtatgtatattggtagtaatagtaatacttgggcccctgcacgttttaagtgaaaatagatctaatattaaatgtctttagcccttaaattttttttaagtgttcagaagtttccctttaaaaaaatttttaatatataataattgtacatatttatgggatacagagtgatattttcatgtatgcagtgtgtgatgatcaaatcaggataattagcatatggatcacctcaaacatttgtcatttctttgtgttaggaacattcaaaattctgtcttctagctatttgaaaatatacagtaaattattgttgactagttacagttctatagaacactataatttattcctcctgtgtgtaattttttatcttttaaccaacatctccctatcctcccctcccactccctttcccggcctcttaataaccacactcttatgagctcaacttttttagcttccatatatgagtgagaacatacggtatttatctttctgtacctgacttattttacttaacatcatgtcctccgggctagacattctctttagaatccacaggtttcctttcttttctctaaatctgcattttgctcagccattaacttttaaaatgtctttttccctttagttttattgttttctattttaatattgcaagatgttttatatttgtgattacaaataaaaactccattattagtaaacaaatacaatgtcatatagtagtaagtgctataaaaaatagacaggatagaaagtaatcttggtttgtatgttttttgttttttagcaaagatgattagagaaggcccaaccaagcagataacatttaagcagaggcctaaatcatataagtgagttatacaaatatctgggaaaaggagttaagagtacagatgcaaaagcccttagacaagagaatgagcttggtatatctgaagagtggataagtcattttgactgaaacagagtggacaagaaaaccagtccaagtgtaaagatactagtgtgtgttcagcataggaaggatgtaatctgaattttgtgtttaatattccctgtgttcatgctttcaaaatacagatgagtgaggaaagtagggagaaggggtaataaaggaagctgagagatcagttaagaggtacttgaatagtttagtaaagatgagagaagatgtttgctncttgttgcccctcactgcttagaatagtggcagtgaagggtaccnngaagctgtcagattnacttaaagagtttnctgatgcagtggatgttggttgtaagagaagaattgataatgactcttggataataggggagggaggggctgtcnatataatataatgaagaagggatttgaagtcatttctgatttaaatctcacatccactacctacttttaatagatatgtagcctttaacaagttccctaacctttctgggccttagctacctccccttggaaatggaaatacctaacatgtaaggttgttttgacagttattttcactaggcatgtaaaggcacttgactctctgttatagaccactgtattatgttaatgtccctctccttcctccctttaggtaaagtttttagggctaatnaatcccgaatatcaatgttgatcagtagtttgtgtttgtgtagtgttgtttatatcaaaactacattgaagccgggcacagtggttnaacgcctaaaatcgcaacactttgggaggccaaggtgggccttccccacttgactaaggagtttgagaccagcctgggcaacatggtgaaatcccatctctacaaaaaatataaaagctagctgggtgtggtggcatgcacctgtagtcctagctacttgggaggctgaggttgatcctgggagtttgagcctgcagtgagctgtgaagatgccactgcactctagtctgggtgacagagcaagaccctgtctcaaaaacacacacacacacacacacacacacaaagaaatacattgatttttcacataggtagtaagagaaacattctttttgaactcagctgtttgtgaattgaattttgtaattcaaatgctatattatgtaaactattgatgactttcaatctgcatttattttgtataattatttagttaatatttgccacttatattccttaaaaaataaaattgaggttgggcgtggtggctcacacttgtaatcccagcactttgggaggctgaggcaggcagattgcntgagctcaggagtttgagatcagcctgggcaacatcatgaaccccatttntactaaaatacaaaaattatctgggcatggtggtgtacacctgtagccctagctgtttgggaggctaaggcacgagattgcttgaacccgggaggcagaggttgcagtgagccaagatcatgccactgcactccagcttggcaacagagcaagactcttgtctccagaaataaaaataaataaattgtattaacatcctgatagtttatctgtttagtacctagcaagaaagaaaatgttgaacatcttaagaagagggtcatttaaaaggcctcttaaagatcatgtttgttacagtgcttaaaaattaatatgttcatctgcaaaatggaataaaaaatctgttaaaaatatatttcactaaatagttaagatgagtcatatttgtgggttttcattttaaattttctttctctaggtgaagctgtacttcacaaaaacagtagaggagccgtcaaatccagaggctagcagttcaacttctgtaacaccagatgttagtgacaatgaacctgatcattatagatattctgacaccactgactctgatccagagaatgaaccttttgatgaagatcagcatacacaaattacaaaagtctgaatttttttttatcaagagggataaaacaccatgaaaataaacttgaataaactgaaaatggacctttttttttttaatggcaataggacattgtgtcagattaccagttataggaacaattctcttttcctgaccaatcttgttttaccctatacatccacagggttttgacacttgttgtccagttgaaaaaaggttgtgtagctgtgtcatgtatatacctttttgtgtcaaaaggacatttaaaattcaattaggattaataaagatggcactttcccgttttattccagttttataaaaagtggagacagactgatgtgtatacgtaggaattttttccttttgtgttctgtcaccaactgaagtggctaaagagctttgtgatatactggttcacatcctacccctttgcacttgtggcaacagataagtttgcagttggctaagagaggtttccgaaaggttttgctaccattctaatgcatgtattcgggttagggcaatggaggggaatgctcagaaaggaaataattttatgctggactctggaccatataccatctccagctatttacacacacctttctttagcatgctacagttattaatctggacattcgaggaattggccgctgtcactgcttgttgtttgcgcatttttttttaaagcatattggtgctagaaaaggcagctaaaggaagtgaatctgtattggggtacaggaatgaaccttctgcaacatcttaagatccacaaatgaagggatataaaaataatgtcataggtaagaaacacagcaacaatgacttaaccatataaatgtggaggctatcaacaaagaatgggcttgaaacattataaaaattgacaatgatttattaaatatgttttctcaattgtaacgacttctccatctcctgtgtaatcaaggccagtgctaaaattcagatgctggtagtacctacatcagtcaacaacttacacttattttactagttttcaatcataatacctgctgtggatgcttcatgtgctgcctgcaagcttcttttttctcattaaatataaaatattttgtaatgctgcacagaaattttcaatttgagattctacagtaagcgttttttttccttgaagatttatgatgcacttattcaatagctgtcagccgttccacccttttgaccttacacattctattacaatgaattttgcagttttgcacattttttaaatgtcattaactgttagggaattttacttgaatactgaatacatataaatggttatataaaaaaagacattttgggttaaaaaggaaattagagtt

SEQ ID NO: 9 - DNA, 2109 bp, Artificial Sequence
  Description of Artificial Sequence:/note = synthetic construct
gcttctgccatctctctcctcctttttcttcagccacaggctcccagacatgacagccatcatcaaagagatcgttagcagaaacaaaaggagatatcaagaggatggattcgacttagacttgacctgtatccatttctgcggctgctcctctttacctttctgtcactctcttagaacgctgcatatttcagatatttctttccttaactaaagtactcagatatttatccaaacattattgctatgggatttcctgcagaaagacttgaaggcgtatacaggaacaatattgatgatgtagtaaggtaagaatgctttgattttctatttcaaatattgatgtttatattcatgttgtgtcattttgttaatggtggctttttgtttgtttgtttgtttaggtttttggattcaaagcataaaaaccattacaagatatacaatctgtaagtatgttttcttatttgtatgcttgaaatatcttctaaaacaatattgagcctaagtgcaaaagataactttatatcacttttaaacttttcttttagttgtgctgaaagacattatgacaccgccaaatttaattgcagaggtaggtatgaatgtactgtactatgttgtataacttaaacccgatagactgtatcttaaaaattcaagagtttttttttcttattctgaggttatctttttaccacagttgcacaatatccttttgaagaccataacccaccacagctagaacttatcaaacccttttgtgaagatcttgaccaatggctaagtgaagatgacaatcatgttgcagcaattcactgtaaagctggaaagggacgaactggtgtaatgatatgtgcatatttattacatcggggcaaatttttaaaggcacaagaggccctagatttctatggggaagtaaggaccagagacaaaaaggtaagtttattttttgatgtttttcctttcctcttcctggattctgagaatatggaacattttttttcaatttggcttctcttttttttctgtccaccagggagtaactattcccagtcagaggcgctatgtgtattattatagctacctgttaaagaatcatctggattatagaccagtggcactgttgtttcacaagatgatgtttgaaactattccaatgttcagtggcggaacttgcagtaagtgcttgaaattctcatccttccatgtattggaacagttttcttaaccatatctacagttaaaggcatttcctgtgaaataatactggtatgtatttaaccatgcagatcctcagtttgtggtctgccagctaaaggtgaagatatattcctccaattcaggacccacacgacgggaagacaagttcatgtactttgagttccctcagccgttacctgtgtgtggtgatatcaaagtagagttcttccacaaacagaacaagatgctaaaaaaggtttgtactttactttcattgggagaaatatccaaaataaggacagattaaaggacaaaatgtttcacttttgggtaaatacattcttcataccaggaccagaggaaacctcagaaaaagtagaaaatggaagtctatgtgatcaagaaatcgatagcatttgcagtatagagcgtgcagataatgacaaggaatatctagtacttactttaacaaaaaatgatcttgacaaagcaaataaagacaaagccaaccgatacttttctccaaattttaaggtcagttaaattaaacattttgtgggggttggtgacttgtatgtatgtgatgtgtgtttatcatatttgtgggttttcattttaaattttctttctctaggtgaagctgtacttcacaaaaacagtagaggagccgtcaaatccagaggctagcagttcaacttctgtaacaccagatgttagtgacaatgaacctgatcattatagatattctgacaccactgactctgatccagagaatgaaccttttgatgaagatcagcatacacaaattacaaaagtctgaatttttttttatcaagagggataaaacaccatgaaaataaacttgaataaactgaaaaaaaaaaaaaaaaaaagtgcggccgc

SEQ ID NO: 10 - DNA, 218336 bp, Artificial Sequence
  Description of Artificial Sequence:/note = synthetic construct
  misc_feature (0)...(0): n=a, t, c, or g
caagctttacactagagcctatatgaagttttgattctaagtgttaatgtaccttctgacaactgtgaaatgaaccttgttcctggggagcgcgttctggttttctctttgcacagttaagctgagactagcatcattctagtttgcaggtgacattctctgggaagctagtctatgggggagatgacatcttctgaacctagtccccacagagaactttgaatgagtggaatcaagaggttgcctgcattcttgctcatgtcacaatgctggacatgtgacttcagagaagcatgtgccaggtcaatatgattgggctgttctcacaatacaaggccttgaccatagagtgattcagaggcaaatgcagccttcttagactcttaaccaaaacattggcatgacataaaattataattaataaaagatatacagttatttcaaaagtaccgttttattgggacatctcaaaggactaagaaaatgtttattttcttatctcctatcttttgttaatagctgttcatcgctcatcagcctttactgaaagcttatcatgtatcaaacaatatgccaggtgtcagagagggcagcaaagagagtacaattgagttagatagagtacctgcactcaataataataacagctaacacttacatagtgctttctgcgtgccaggcttgtcctaagtgattttacacacacacacacacacacacacacacacacacacacactccctcactcagtccttataaaaacccactgataggccgggtgcggtggctcatacctgtaatcccagcaactttgggaggctgaagcaggcagatcacttgaggtcaggagttcgagatcaccctggccaacatggtgaaacctcatctctactaaaaatacaaaaattaaccaagcatggtggcaggtgcctgtaatcctagctactcaagaggctgagacaggaaaatcacttgaacctggtaggtggatgttgcagtgtgccgagatcgtgccaccacactccagcctgagcaacagagtgagactctatctaaaaaaaaaaaaaaaaaaattaaaaacccaatgaggtggctactgttatcatccccattttacggatgaggacatgggtacatagagattaagtaacttgccaaagatctcacaactggtaagtggcagagcaaaatttgaaaacaaacaatctggttccagaaactgtacttttaacctcatgatagcttcctgaggaatttatgatctgagtatatatagtaagtacctcccctttcagggtaaggcagtaggtaatggtgaacagggaagcaaaaggtgactcaggttgagtaaacaacaccaagcatatctgactcaaggaatgcttcagaggccaggggtgcatgcctgtaatcccagcaccttggaaggctgacacaggaggatcactggagcccaagttcaagaccagcctgcacaacatgacaaaaccctctctttacagaaaataccaaaattaggtgggctttgtggcgcatgcctgtagttccagctacttgggaggctgagagttgggagaatcacttgagcctgggaggtcgaggctgcagtgagctgtgatcgtgccactgcactccatcctaggcaatagagtgagactctgtctcaaaaaaaaaaaaaaaaagaaaaagaaaaagaagaaaaaaaggaatgcttcagtctgctccaaagaaaagaatggagtaatgtgaagtattaaatgtagcaagatgccactgcagtagctcacacctgtaatcccagcactttgggaggctgagatgggaggatcacttgagcccaggagttcaagaccagcctgggcaacatagtgagaccccatctcttaaaaaaataataaaaagtaaataaaaataaatgtagcaagaaattagaaatctttatgaacagatggcaatccagtttaatgttatgtgcatggccacaacccttattccactacatcctcctttcacatatatattatgaaggttaatgaatacaatcattgtgataacatttcttttctccctttctccctcctctggtagagtactcacataaaggctgcattcacaattgaggttagaacttgtctaggcatgtctagtgagcaatgggaggagtctgctaggaaagtactttcagaatactggaaaccttagggagaaaactcctcctgaaggtagaaaattgcagaaattataataaagcctcagctgctataggagaaggatagctttagtacttttggtagggaagcagtgtagcagcaaattttaagagatatatgagaggtatttaagtggatcatgcctgtaggtcatttagtagtagtatgcaatcaataaatattcattattacttgtgtgacagtgcttaccccacactgtcctttatagaaacatatttgcagagacctggggagaaaatgcaaacatgccagagggcttcataagaccatacataccctttaatgactccattaagtgttatcaacaaatgttagtaataataaatatagttattatcattattgttcttattacagcctcattttatgttattactgattttttaatggggtcagtgagaaaataagacttcattctcaaaatattcaaatgtctagtcagatcctggcagcagctgcagcggctctccttgccatctccttttcacttctggaaacatgggctcccatgtggctgtctttgatgatgtcatcaaggtgttcagtgacatgaaagtgtgcaagtcttcaacactagaaaaggtgaagaagcgcaagaagttgctgctcttctgcctgagtgagtacaagaagtacatcatccttgcggaggccaagaagatcctggtaagtaatgtggaccaaaccattgatgatccctatgccacttttgtcaagatgctgacagtaaggactgccgctacgccccttatgatgccaccaaggacagcaagaagaaggacctggtgtttatcttctgggcctctgagtctgcatccattaagagcaaaatgatctatgccagctccaaagacgtcatcaagaagcagctaggggtcagcactgtcgtcttcttggagggcaaactttgtgatcccctccagcgcccttcctggagaatctactagtcccagacctgccctcagggattgcaggctgcccccttcctgccagactggagggcctgggggaatcccagcagagggaaggcactcccttcaccccaattgccaaacagccccccaactccctggattttcctcctctctccatccctgacagttctggccttcccaaactgcttggatcttctgattcctcttgggttgaagcagaccaagttctcccaggaaccccagttggggaaggcctatatatatattttaaaaacaaccccactctccacctgttcctccaccttcccatgctacaacttctaaccacaacagtgactctgtgcctgtctgtttagttctgtgtataaatggaatgttgtgaagatggccccttcccatgccagctggttcctctcccttggttatggccgctaatggaaaccggactagtgagcgacctttaatttttaaaaaaagaaaatacaataaaataatactcaaatgtttaagcagatttcccaaaacagagtagaatagaattcatatgaataagcaaacaatttaattgttactactggcattatgttatggattttgctttcctacagaaaataactccacaactgattttattagtatagaattaatttcttgctaagagtcatttttgcttatctcaccattggatatttgcaaagtcactaatatttcttttatccatcattcatatgtaagtaaatatgtaccttacttcctctttccaggcaagtagaggttccaaatatagccatgtgtcacataacagggatttgttctgataaacgaatccatagacaattttgtctttgtgcaaacatgataaagtgtacttgcacaaacctagatggtgtagcccactacacacctaagctatgtggtatagcctgttgcttctaggctacaaacatgtacagcatgttactatactgagtactgtaggcaagtgtaacataatggtcagtatttgtgtatctaaacatacctaaatatagaaaaggtacagtaaaaatatggtataaaagataaatggtatacctgtataaggcatttaccatgaatggagcttgcaggactggaagttgctctgggtgagtcaatgagtgagtggtgagtcactgtgaaagcctaggacattattgtacactactgtaaactgcataaacactgcacactaggctacaatttatgaaaaaatttcttcaataataagctattaaataacataaagttgtaaataataataaattatgattacatatcaacaatattttctttatatcctataagcttttttctatttttaaattaatttcttaaaattttttaaacttattttgttaaaaactaagacacaaacacccatgtaagcacaggcctacacatggtgaggatcatcagtatcggtgtcttccacatccacattttgtccactggaagctcttcagagttagtaacatacacggagctgtcgtctgctgtgatattgaagctgttttctggaatacctcctgaagaacctgcctgaggctgttttacagttaactaaaaaaaaataagtagaaggagtacactctaaaataacaattaaaagtatggtatagtaaatacataaagtggtaacagttgtttattatcattatcaagtattacatagtgtacataattgaatgtgctatacttttatatgactggtagtgcagtaagtttgcttgcaccagcatcaccgcaaactgtgagtaatgcattactccatgacgttaggatggctaggttcacaaggcgataggaatttttcagctccattataatcatgggactgccttggtatatgcgggctgttgttgacagaaacgtcattatgtcacgcaagactagataatgagggaatccttttcctcctaattggttatttgagctgtttaatctcccttccactcccagcaagtgtagtcattaaaataccttacataactatggagccttcatgattagaactgcgatatgatgatgttacatacccactcagggttctctgcttcagggccaaagtttgggcaatgtcacacctattgtactttttggatggatttctctgtcatgagaggaatgggaaatgaaagaaggatgagcccaatgtaattctgagaatcagatttaactagtatctgataaagcttgcaaaatttccatgttgataagttgatctaatttatttgtttaacctgctgtataatgttttatcatatgaaaatatcacatttgatttatctatatggaacatttagattctaattttttgctgttttaaataatatttccatgaatttccctatatgtttctgctttcaatatatgaaagttttgctagagtaggggtctttaaacttttttgttagcttatcccacaaacaatttggaaaaacttttcctctatacacatggtagagttagaattgaacttttttattctaagtttaagtaggtggaaaggaagtaatttcctagttatgtaacttttttttttttttttttggagacagagtttttgctcttgttgcccaggctggagtacgatggcgcaatcttggctcactgcaacctccacctcccgggttcatgcgattctctcctgcctcagtctcccgagtagctaggattacaaacacccgccaccacgccctgctaattttttttttttttgtatttttagtagagacagggtttcacctgtatttttagtagagacgggttttcaccatgttggccaggctggtctcgaactcctgacctcaggtgatccacccgcctcggcctcccaaagtgttgggagtacaggcgtgagccaccatgcctggcctatgtaacatttaaagtagaattcttaagtgtatccaatattcataaataccatagtaatttgttgccattgcccatcaaaacattaaaaaaacgaacaagcattttttacaatgggaaattttacatcattcttttttctctttgaacttgaattttttttccaattctgatacagatttttatttggatgtaatatatattatgtgtgaatatcttttattgatgatgactgtatcatatttccatgcaacaaattttataaaaatttaaattgtgttaaattttctggaccataatgctcctcagtgttaaaaattattccaaattatcattaatatttttgtataatcaaataaatacttttaaattttgataattattaaatataaaaaaatcaactgggcttaaaaaattggtttatatatcacaaatgaattttatatattcctagaaggagacaagttcagcattagatcatttatccctagtttttgcttttatgttgtaaacattgagtaatattattcacataagtagatggtgagtgaaaggaagtgttttagcagtgttactcatttatttgaaagcttcccaaattatatgtcatacatcacttagtgatcttatttgtaatgatttttcaatgaatagtttcaataggttctccttcaatttaccagaaaaaaaattaatgttaaacaggttaacttttaaaagggtttgttggtaaaattattcagctacttagcagcaatatcattattgcagatgatctctttagctccttgcaggtttttacactttcaggcagtacatcgtttcagcattcagatggagaggggtattctgttctcttttaaagtgggataaagggcactgtgaaaggggaaatggggacaaggaactactaggtccacttgactacactagttctgaggcacatcagatttaggagaaagtgtatatggaagttatggaattgattctcttgaaactaagaaccttatttctcctatttgaagaccactactctgatgtttatacccaaaagtggaattgcttgtgttggagtctcctaagctgtgtaactgtttcactgaagtcacatcactgaggacattgctgtgcctctcaaggactcaggaacagtccctctgtccatatatgtaagtcatagcaatcttctatatttgggaaaaatcccttggtcgccttatttaaataactggtgagcaatgagtagtaatccatcagtgttctatgagacaccaaatttctttctataatgtggcttttgacaacttctggaagtatttttattcatgattctcacatttctttctttaaagggcatcattagtctaccatcaaccaagatgttatacaaagacagcatcgtaattcatttacattgagtgccctaaagcacaaatgcctttaaggccttctttactctctattaattgcaaaataaacagatgtctactggagaaggttattagaaataatttgtgcagtttgggagaactaggggtcaggattccttgactcagcttctgaaacaaactcaagcccactaaaccaccaaggtaactacatccagaaatctgcaaaccagaaaatgtttgccctgaataaggtaaaggacaaaaaagaataagggcaaacattttctggtttgcagatttctggatgtagttgcaaaggacagtacatttcaaaaacagagtaatggccattctcaagcaggactcagtttaattctacttgaaaagagtgagaacatttaatgtgccaaattcaagtcataaggaaaagttgaccagttaataggacaaatgccacaacattgtaaaataaacaagatttgaaatgcagaaaatcctattttacaatgaacaagtctacaagaacacaagaataaagcacatcttaattaagtcctccctcttacttgtttcaacaggtgaggtaggaaaacagtggtcctatgagtggcagcagccaatggcctggggctgcaccctgggagctagccaagacaaagatgccatgtccagaaaagaaatttcagaaatgacttatggctcagagccatgtatgtaaatgaggttatttttttttttctctgaaaatggtctgtttctatccattagctttctcccagttccctgacttcataaaatttatgttaaggatttgaaatattcccagattaattttcaagtaccatgactttacttagagacttcatttttctttagggttccctgcaatgcaaacctgtaccttctttaataaatgtaaatatttaagccacgtgaggtggctcacacctgtagtcccagcactttgggaagctgaagcaggtggattacttgaggttcagagttcaagaccagcctggccaatatggtgaagccctgtctctactataaatacaaaaattagcctggcatagtggtgtgtgcctgtagtcccagctacttgggaggctgaggcagtagaatcgcttgaacccgggaggcagaggttacagtgagccaagactgccccactgcactccagtctgggcactccgtctcaaaaaagaaaaaaaaaaaaagtagtacatttagtacaattaagtaacaaaaatctacaaaagggaactgttctattatatttagaaaagataaaatttccctcctaagctagttctgacattaggtttttctatggtattctttctgaagttcctacaagagagaaaaatctaaatcacaataggagtattttttgaacttattctattgatcttaaaacattgtttaataagagacttataactgggcagggcctagaactgctttattttattatttagtgtaaccatgaaattaaacagtggtctaccattggggaccaaggtcagattcaaaaagatttaaatataaattaaagctactacacatttatgtggttgaaaaatcaaaaggtacaaaacaacagcatcacatatgatatcacttgtggcccttgcagttgtgtaacttggcagtcctgtatatatcaccttcccaggggatctctcagccatatcagtttcttgtatattaataaggggaatcttgaaagatagaggtcaagaggagaaaaatagggattggaagaaagaatggcaagagagggcaggagaaaggagagtggaacgatggacgaaaagggaaagactgaggccttatacaaaggattggcaactttctcccagccctctcttgcagttgtccttggtgtgtgtgtgtatatttgtacatgaatagaagaggaagaaatggaaagctggtgggggcggggggaagccacttatctggggaaggatagtggtgagccctggagaatttttaacttagtgcatgcattacttgaataaagttccttgtattgccttttctgatatcatttttatctagactcatccaagaatatgttagtattttgagatttagcttttgggaaaaaattcaaagctaataagcataaatatttgtgcaagaaagagaagcagatatgcagacctctaccacctcttaccagagacaaactaacctttctccagcacacattggcctgatgaaatctagaattaagctttctctcagcactgacctgcctcagactgcaaagaggttttctaactggttttgagccatgatgaaggtgctgactgtaactgcatggcagcattttcattgactccaactcttcagcaggtggcagcgttctccttgctccatgtgggtttggtgtttccttcctttcaaaagagcacgggcctcacagtcccttttctgtctgcggtccacatgtaacggctgcctcctttatattcttgtctgaaagacactctcccagtaatcttaggaactaaggaggagaaacaaatttgcaacatgtggctattcatgttttaatgtttgatccttaaggtatttagcgtcatgggctaatttcaaggcacttaaggttagagtgaacatcgggaatcattcattcacttatccttgtttttctccatcccaaaccctatttatcatctctatttaagcaatctccttgttttctttgttcactcctttccaagccttgaaaatgtcattaaaaaccatctctagtcaaatttctaactaactcatttaggtttctatacaagctagactttcttaccatctttattcactgatagggtatatcagggaattctccgggctccaactgaggatccctcactgagttgctgtgtaatctggggcatgtaaaccctttgcgcctcagtttcttcatttgtaaaatgagattggtaaactagcgggtctatgaagtttttttctagctcttatgcactggatgataaagcagtctgccactctcttgaatggaagaagatgggggtactgtgctgtcatatgattatttttcgaggacattttctttgagcagcaaaagttattaaatagtacaaagagtaaaaaatagatctggtcaagaccattgatctggggaagagagggtattcaggataagatacagcctgtctaccacacatctctactatgtaccatttatggcagatattcccatgtatttctattgtccagcaaacaccaaacagacccttacgcttaaattctggaaattctttagggtgctcatttattttaaaatacaattagaatcgagcttctttcctggttatttaatattctcttgataatagacatatatttttagttttaattctaatggatgaaatcacctttctaccttataaatataataatcattgtaaagaacctttgaaccatataaaaaacaataaataaaaagagaaatttatctcccttggaagccttccctctctatcctgccctcagagagaatgtgttatctcatctcttattcttccagataatttgtatgtatttatgcaaacacatgtatatatatatgtattatcacttttgttttatttcattgaattttaatgaatcttttgggaaatacattagtcctagagtagaatcatgctgtaaaatagatgagtaagcacattaacaaactagaagattaaggagcaaaatagaaaacaactgaaaacattcagttgctaatcaaattgtcagctgataggattcttaaatgacagatattctaggcagaactgacctgagagaaggactacgtaaaatggtctgttttggggggttatttataggggataggactagggtcattgtggaagatggccaccaacaattcctccatgcctctacacgcatgccacccttcccaccaaaaggagatggagtctgtttcccctcccttgaatcttttttcagcttccccagtagctagaactacaggcacatgccaccatgcccagctaattattatttttttgtagagactggggtcttgctatgttgtcctggcctcaggcaattcttccctctcagcctcccaaaatgctgggattataggtatgagccaccatgcctagctaatttggtttttaaatattttattttaaaagaattttttttttgaggcagagtctcgctctgttgcccaggctagagtgcagtggtgcgatttcggctcactgcaacctctacctcccgagttcaagcgattctcctgctccaccctcccaaatagctaggattacaagcatgcgccaccactcccagctaatttttgtatttttattagagatggggtttcaccatattggccagtctggtctcaaacccctgacctcaagtgatccgcctgccttggcctcccaaagtgctgggattacaagtgtgggccatcgtgtgtggcctggaaaaaattctagacttagaaaaaagttgcaaaaatggtatggattttttttttttttttttttttttnnngacacagggtttcactgtcaccaggctggagtatagtggtgcgatcactgctcactgcaactttgacctcctggggctcaggtgatcttcccacctcagcctcccaagtagctgggactataggcacacaccaccatgcccagctaatttttgtattttttgtagagacatggtttttccattttgcccaggctggtctcaacctcctgagctcaagcaatctacccacctggcctcccaaagtgctaagatgacaggagtgagccaccatgcctggcctggtgtggagtttacgtatacttgttatccagcagccctagtattgataactttttttttttttaaagagatgggggtcttggccaggcacagtggctcacgcctataatcccagcactttgggaggccgaggtgggcggattgcgtgaggctaggagttcaagaccagcctggccaacatggcaaaaccccatctctactaaaaatacaaaaattagctgtgcgtggtggcatgcgcccataatcccagctacttgggaggccaaggtaagagaatcgcttgaaccaggaggtgaaggttgccgtgagccgagattgcaccactgcactccaacctggctgacagagtgagattctgcctcnaaaaaaaaaaaaaaaaaaaattccctgctttcaagagacggggtctcactatgttgcccaggttggtctcgaactcctgggttcaagccatcctcccacttcagcctcctaaagtgtcagaattacaggcatgagccactgttcctggccaataacttattaatagccacagaacgattatcaaaaccaggaaattagcacaaggtacgaaccttatatgaaattcacttgtttttgtagtgatgttctttttctgttccaagatttaatccaggttcccttacttgctcttagttgatatgtctccttagtctggggaaaagacttctaacagagctggaagagcagtgagaaaattgctattgaaggttggagaaatggtgttagtagtggcaagatgtttgacaacccttgtggtcagatgtatggtaaaacatagaagacagaaagtgtacctaataaacttgtggatttggcaacattcaggctgaatgttcagagtgacaattggcttcttttagggatgtacgaagatacacaagtgatgtatgatgataacacaagagacagagatgtgttaaaaaaggaactatcccatttttaagcagagtctctttatgccagaaagactctcaaagtaagaaatggcctcaagggcctgcctgtagaattggcctcaagttaaagatcttatcgagacttggtgctaagacctctaaaatatttaagatattgcctctcatctagacaaaaggtcttctaagaatcttaagtgttgtcccacagtagtcacctctacaggtccacagtagagagaggttttttaaatttttaatttaaatttttaatttttttcagagacagagtctcgctatgtttcctaggctggtctcaaactgctggcctcaagcaatcctcccaccttggcctcccaaagtgctaggactacaggcagagaggtttgtttttgaaagaattatagatgttgctttgcgggcaagaagtgaaccccaataagagtcacaaaattttaaagagagttatatggataaaattgcaccagcttggactaaggaagagacagttcaaaatgaaaaaaccttccaagcccccaacttcctacgggcaggaagcaggctgagagagttatttaactgtaaaaggaaggaaggcagtttcttttcttttttttttttggtggtgttagtaacttttattgaagcggcagtgtacagcagcagaggtactgctccttgcagagcaggctaacccacaagcgatgtgcccggcgtagctgctcaaaagcagttctgcgcttatatttatacctacttttttgtttttgtttttgtttttttattatactttaagttctagggtacatgtgcacaatgtgcaggtttgttacatatgtatacatgtgctgtgttggtttgctgtacccattaactggttatttatattaggtatttctcctaatgctatccctcccccatcccccccacgacaggccctggtgtgtgacattccccgccgtgtgtccaagtgttctcattattcaattcccacctatgagtgagaacatgtggtgtctggttttctatccttgtgatagtttgctcagaatgatggtttctaacttcatccatgtccctacaaaggacatgaagctcatccttttttatggctgcatagtattccatggtgtgtacgtgccacattttctaaatccagtctatcattgatggacattttatgttggttccaagtctttgctattgtgaatagtacctcaataaacatacgtgtgcatgtgtttttatagtagcatgatttataatcctttgggtatatacccagtaatgggattgctgggtcaaatggtatttctagttccagatccttgaggaattgccacactgtcttccacaatggttgaactagtttacagtcccaccaacagtgtaaaagctattctccacatcctctccagcatctgttgtttcctgattttttaattatcaccattctaactggtgtgagatggtatctcattgtggttttgatttgcatttctctgacgaccagcgatgacgagcattttttcatgtgtctgttcactgcataaatgtctataaatgtcttcttttggaaagtgtctgttcatatcctttgcccactttttgatggggctgctttactttttcttgtaaatttgtttaagttctttttagattctggatattagccctttgtcagatgggtagattgtaaaaattttctcccattctgtaggttgtctgttcactctgatggtagtttcttttgctgtgcagaagctctttagtttaattagatcccatttgtctattttggcttttgttgccattgcttttggtgttttagtcatgaagtccttgcccatgcctatgtcctgaatggtattgcctaggttttcttctagggtttttatagtttttatgtctaacatttaagtctttaatccatattgaattaatttttgtataaggtgtaaggaaaggatccagtttcagctttctacatatggctagccagttttcccagcaccatttattaaatagggaatcttttccccatttcttgtttttgtcaggtttgtcaaagatcagatggttgtagatgtgtggtgttatttctgaagcctctgttcaaggaaggcagtttcttatgaaaaaggaaaattgattcagagttcctagtctagaccccagagggtggaactaagagctcttgagaacaacgcattgggaaactattctgagggaggccaacctaggcactaatggagaacttgatcctcagaggaccggtaacagtgcttggctggatttcagaattgctatggactaatgactgctatatgccttccatttccgccattttcaaacaggcgtgtctactgcagttatcctatccctttttcagcattgtatgttgtgtatgtaacttctcttttagttaacaggtctccagatgaagaaaagctgcatctgaaatgcctcatccacatctaggcctagtatagattactagatcctgaagtttaacactgatgctatatagaataatagttttggagaaagggagtgagtgtattctgcatgtcgtgtgtgtgtgtgtgtgcatgtatgtgcatatgtatactgttgtagctggaggatggatcatgatagactatttcccaaattgactggcaacaatttctcatcccagctgctacttccatcaaggagtatctttcccttccttttgaatctgggctgtccttgtgacttgcttggccaagagaatgcagtggaagtgacattctgggacttctgaacccaggatttaagagaccctgtattttctgctgtcttcctcttgggatccaggcactgtataaagaagcctgggttggaccactgaataatgagcaaccacacaaagaaaggaggctcctaaccatttttagctactctagctgaggtcccagacatgtggtaagctatcttggacattccagacccagccaaattcacagctgaataaagcacgtctgaccctagctaatgtcattggggagccgacctgtccagctgtgcccttccccaattgcagaattgtgaggaaataaatggtggtagttgttttgagccactaagttttaagcggcccccatggtatcagttcaggtcagacatgtgctttattctgctgtgagtttggctgggtctggaatgtccaagatggcttcccacatgtctgggacctcagttaaagtagctaaaatggttagggactcctttcttgctgtggttgctcatcattcagtggtccagcccaagcttctttacacagtgcctgggtcccaagaggaagacaacagaaagttttaaggtaatttattatgcagcaatagataattgaaaacaattatccagccaggtgcagtggctcacacctgtaatctcagcactttgggaggtggaggtgggcagatcccttcaggccaggaattcaagaccagcctggccaacatggcgaaaccccgtctctactaaaaaaacaaaaaattagccaggcacagtggtgcatgcctgtcatcccagctactcgggagactgaggcaggagaattgcttaaacacctcgggaggcggaggttgcagtgagctgagattgtgctactgcactccagcctgggcaacagagcgagactgtctcaaaaacaaaacaaaacaattatcaaatgtcagggtatcttcctattgctttacctttactctgtgggctgggaagaagttgtaacaatgtcagccatagaagtcaagttttcaatgcagactaaattccatgacagtgaacactatatgccatagtagtcactgctctgtccatagagcttagaacagtattgccacttaataggctcccaaatatttgttgattgaatcattaaataaatgaattgagataagatcccctaccctcaagaggatggacaaaaaagattctttaaatggagtgtggagtcttaataagggaaaagaagtaaagaaaaagcagataagctctaagtctgccttttttcatggtccagggctatttgtcccatgcattttctctttgaaaaaggtgctgttttttgtgatgccttagaggccagaaggatgttttgaaggggaaaattgtaggagttaggcagagcagggttttggctccttctcaatgtccctctacctagacaaattcgggctattctgcagaggttgcagtgagccatgatcacgtcactgcactccagcctgaggaacagagggagactccgtctcaaaaaaaaaaaaaaaaaaaaaaaaaaaaaaaaaaaaaatttcggcctactctatgaagcacctggtaggtgtcccaatattttctggtatatgggaattacctttttctattattggaaggtctaaaaagcaaacaatgtgctccatatggctagagttagtattaaggggaccaagtagaataattggtagctagtgttagcctggagactaacatagtcaaagctgtcttgtcatgttatgtcttttttatttgtattgctccacggtccaagacaaaatttctgaacgccacttggacacagtgagtacctggtctgctctattgttctcaggagcaaccaactcaacccttatttctctgagaatgatgatttcatacagcacatctctctaccaagatgtgaaagatgacaccatggcatctgaaatagcttcaggagagatttgggacatgggaagcttgtagacaataatggaaaattctcttttagaatatagttacttgtatgacccacagtagcgccttttggagaatgtcttaaaattatctttattgaaagaacaataatgtttgttattaggataaatgaaataaggggaaaacctcagacccttggaacaatgggtttacattcaatccaatgattattatgtttttatattctgtattatttagaaaacagtagttaaacagacagaaatacagaagattgtttaaaaattaaagctattgagttagatccctttttgaaaggtcagcgtatgggagatgagaaaggcactatagagatcagagtgtttacacaaaagacatcttagcagatgacctacaaagagcacatcaagtatttatatcatccacatcaagttgctggtcatttcgcttatcaaagaaaataagaaagaaattttctttcgacattattttggtgtagtaacaatagagttttggaatcagctgttagaagcgataattaaagctagtttaccatgcttactaatcaatctacatagtcaccctgaagctttatataattgtccctttgttacaagcttctacttctccctatggtattctggttctgaatccagacaggtaaagaactaagtatggccgggcgcggtggctcacgcctgtaatcccagcactttgggaggccgtggcgggcagatcacgaggtcaggagatcgagaccatcctgaccaacatggtgaaaccctgtctttactaaactacaaaaaattagcccggcatgatggtgtgcgcctgtagtcccagctactcgggaggctgaggcaggggaattgcttgaacctgggaggcagaggttgcagtgaaccgagatcatgccactgcactccagcctgtgagactccgtctcaaaaaaaaaaaaaaaaaaagaaaaaaaaaaaaagaactgaagtgcttggagaccagtgtattgtaatatctatacagccaagcaggtattttcaactgaactttaaaaaagtactatttttgaaactttctttagtttagatagggccagccatttgggtagaaaggaaaagaaaaacaaaaaattggaaaaggatgcatcagtatttctttcagaaacaacttaacactaggaacagaaggaggattttattcaccaactcctaataaccacctgatgttgctgttgggctggccaaatatctgccaacattgatgatcctttcattcaccactagagagaagtagagggacctgatgtttagagaagcagtaaaacccatttcccattttctttcttcagccggatggaagtacttggaggctggtctcatattctagcactttagtgctggtgatgcagattatctctgctccagagtaactctgtgccatggaatccaagaggattctgtcgcaccaggacaggaatgcacccttgtttcatttgcttccatgaaagcagatttcagagattctcagatgctatgagactaattgtcacttagggtaggctccaggggagggacagagaagggcagtgctaataacagggactctggagacaagatcagcaatctaagaaacaaatgtgagacattttacccctccctaatctactccccttttaaaagttcatcttcattttccctttttctaccacgcagtaattgataattaaacacagctctggtttttaccatgcaatctagtagaacacctagacatcaggaactccttatctttggttatttatacaataatgaaatctgtagttcacgctaggctgtgtggacagtatctgcatctctggaaatcaactggaggcctttctcttactcttttccggttgctttccatttccttttccactgtggtccttgcctttcccaagctgaccagaactatgcacaaaaccagtcttcaataaatatcaacactgaagcttcagcaggttgttaactcctgcacagctatcttaaatgctgtatataagtgcaaagttttatggagcctcagaggtctctaagaacactgtaaatatcccaggtttaattagtagtcccggagttaggtaatggcctgtggctttctgcgctaggtctcttgaggtttctagtcttcagaggttgcctgcaactatgatgtgcacatatacagtactctttctcaaatacagcataaaccctctttagactttgctaggcacttacaattattgaacacacatgcagattgattctcattctctcaaagtttgaaaaacaactcagtgcttcaacctaggtctcgttagatattttttgactcaaattgtcgtctgtagttctacttcctaagggaaatgaaaaaacaataaattcccagactggtgttgatgctcattctctttaagcgggtcgactacttgctttgtagatccttgacgggtggggtgcggggtaggagtgcgatccaactctcagcatttccgaatcagctctctcacggtgacaggtcagcccaatcggggctgtaaacagacttgacaggtttgttctgggctgacggccattgactaggttctcagaccagataagtcacttggctgagtccacagtaggtggggcgcgctcaccagctcaggggtagtgactggacgtttgttgcaacatcggagaatgcacgctctgggctgcagcaggagataccctcaagcacagaaccaaaagggttcaccctaagcggcagggcatcagcgatggagaggcccgagagccctagcgcccagctccttttcccacgtttgggaaggcgcagaataggtcgatgtagagcaaggagtgagtctcaggtctcagtcctttggcttgctcttagggtagcaggcgaggagtggcaccagtttggggactctctccccgcgttctgtaagaatcggcggcagccagcaggcggggaggcgggggcacgtgtttggatgtgggtgcttgtgtaaccagttccccaagcgccagccccgacagcgctccttcgggaggctggtccgagcccctgtttccgccgcggcgcaggaagggttggggttccgctgcctgcaccaggcaagagcaccccgagcaaaggaagaagacgacttgcctccggagctatcactggggagtgggaatttggaaagttccccaactagggacacacgtgacctccttcggaaagtagttccgactgtggcccgtgtatccttccacctccttttgaaccctcctaggtctcctcgccccgcccactcgctgggctgcagcttcctaccgttccgtactttccactcaacccggtaaccccaaacgtgcacggtccggccggggcgcgcggagcctggccccgggcgatccatcctgccgggttttcacggcggccaagggggggcggggctaggtggtctctgagaaccgagcttgactccgacgccgcgaaccgacctggagcccgaggggaaagatgctcgactctcttgggggcaccggagcgggcgcaggagaggcctgcggggtgcgtcccactcacagggatcctctttcagttcatttagataggtgccctttgggcccttgaaattcaacggctatgtgttcacgttcagcacgctcggctgagagctttcatttttagggcaaacgagccgagttaccggggaagcgagaggtggggcgctgcaagggagccggatgaggtgatacacgctggcgacacaatagcaggttgctctttgtgctaagactgacaccatgaggacacagatttgggggaagggggaatctctaggcaaaggctgttacagtcaaatctctgcgaacgattgtgatccgacagcggtgcaaaaggaaagagcgaatgcagtccacgccgcggaaatctaggggtagaggcaaggggggagggtattccccttgcagggaccgtccctgcatttccctctacactgagcagcgtggtcacctggtccttttcacctgtgcacaggtaacctcagactcgagtcagtgacactgctcaacgcacccatctcagctttcatcatcagtcctccacccccgccccacaacagcctaccctgcctccggctgggtttctgggcagaggccgaggcttagctcgttatcctcgcctcgcgttgctgcaaaagccgcagcaagtgcagctgcaggctggcggctgggaaccggcccgagcaagccccaggcagctacactgggcatgctcagtagagcctgcggcttggggactctgcgctcgcacccagagctaccgctctgccccctcctaccgccccctgccctgccctgccctcccctcgcccggcgcggtcccgtccgcctctcgctcgcctcccgcctcccctcggtcttccgaggcgcccgggctcccggcgcggcggcggagggggcgggcaggccggcgggcggtgatgtggcgggactctttatgcgctgcggcaggatacgcgctcggcgctgggacgcgactgcgctcagttctctcctctcggaagctgcagccatgatggaagtttgagagttgagccgctgtgaggcgaggccgggctcaggcgagggagatgagagacggcggcggccgcggcccggagcccctctcagcgcctgtgagcagccgcgggggcagcgccctcggggagccggccggcctgcggcggcggcagcggcggcgtttctcgcctcctcttcgtcttttctaaccgtgcagcctcttcctcggcttctcctgaaagggaaggtggaagccgtgggctcgggcgggagccggctgaggcgcggcggcggcggcggcacctcccgctcctggagcgggggggagaagcggcggcggcggcggccgcggcggctgcagctccagggagggggtctgagtcgcctgtcaccatttccagggctgggaacgccggagagttggtctctccccttctactgcctccaacacggcggcggcggcggcggcacatccagggacccgggccggttttaaacctcccgtccgccgccgccgcaccccccgtggcccgggctccggaggccgccggcggaggcagccgttcggaggattattcgtcttctccccattccgctgccgccgctgccaggcctctggctgctgaggagaagcaggcccagtcgctgcaaccatccagcagccgccgcagcagccattacccggctgcggtccagagccaagcggcggcagagcgaggggcatcagctaccgccaagtccagagccatttccatcctgcagaagaagccccgccaccagcagcttctgccatctctctcctcctttttcttcagccacaggctcccagacatgacagccatcatcaaagagatcgttagcagaaacaaaaggagatatcaagaggatggattcgacttagacttgacctgtatccatttctgcggctgctcctctttacctttctgtcactctcttagaacgtgggagtagacggatgcgaaaatgtccgtagtttgggtgactataacatttaaccctggtcaggttgctaggtcatatattttgtgtttcctttctgtgtattcaacctagggtgtgtttggctagacggaactcttgcctggttgcaagtgtcaagccaccgattgctttcttaggctatctatatggtctcttcctgagggctattgtccgttaatacagaatacagtacactgttagtggattagcgagctcggtaatccggtctcctaaatgaacaaaaaagtagacgctttttgaggttgagcatatttcgattaaatcttggcttaggccctagatcaagggtttagatcagaataaaatgaaaattagtgttgcacgtacgcatattgcatcagaatcttgcagtgattgttttagtttcctgagttgcattgatagattcttttaaaatatgactgatttgcataactttagaagcagaatcattttcagtatatatggtgcacattgagggcaaaaagtagttttgttaatgtttaaacttaagttacctacaactttgaactgtatgtagaagttttgtagtttgaagtcaatagtgccataatataccttataaggcgttcttactagatctttgttatatttacctttttctctccctatggggtgatgtaggatagtgcttgaaatttgcacttcagtagcatttaatgttcagtgctcttgtcataaacatagaatggatattgagtagtttctgatcccagatggtaatgtgtaggttcaagggtattgtgtgtagcaagtgaagattgcagaaataaaacttcagttcatgcttgaaatttaagtattgttgtgatgccagaattgctgctcaccgtttttaggtttcaggtcctctgacaccttttggtatcgttaattttactgatttgtgtagaatgtcagttgtattttaccagctaatatctagaaatgctggcaagaggggtttactccagctttagattgtaggtatgttagcttttttcatacagtgtattaaatttactgagtcagcttgctgaataagacagaagcccaagaattttaacagtgtgtagctttagttgtctaaaagttaggccttcgggcttcaaaagttagtggtcatcgaaaagcattaatctttgcagtttcaggtacaacacattggttttgattagggatggggatggggccctctttttgcagaatggggaaagtattgacaggaattgagagctattggtaggccagtgtataaggtatgtgaaaacagaattaagttattggtctgaagtgactgaagcatttaggctctatcaaggcctaaaatttggtaatatgagtttggtaatgcgaattgtggcagtggacaatatttagttaaaattatgtaattgcataagtactagcacagtatttttaataaaagttatttcttagcaaatgtcagttgcattttgtctaaaggtagagtgacactacagtgtctatatgtcctgctaaaaattgtggggaatatttttttttaagacagcgtttatatcgggagaggttttattccgttggattatgttagctgcatataaatgtgcacagttaattttgcccaagtttttgttttgaaatgaatgtaaaacttactgaagaagtagcttcccaaaatttagttttctgttaagccaaaaatattattttaaaagagtatttgcaaattttgaagttgacattaattgagaatgttactaaggctaaactggacccgcttgcccagaagataattatggaaaaattcttttgtgacttccaaagcagtctactattagcatgaattactgacagtcatccaaatatataggaacaaaaaattaaatgtttatgtaactttgaaaaaaaagcctttgaagaaaataattgaatgctgtctgggagacagatttctttcagcacttaaagtacataacacactacttttacttttcccacttgattttaaattatcagggttattaagaccttaaaattattttaccaggtttttacatgtgagctgtgacatgactggcattttctttgatttcagcgtatgttggtctctacacatgaaatttgtgtgacttaaaactttctctaaaactgtacttttagttatgatatgcatagaaagcagtatcaaatattgcgtcaaatgactaataacacttaatttctagagttgtggttttattgagccaaaagttgatatgaaaaaaagtcagtaaggaaagtcagtgaagtgcttgcttttttgataattgcactcccaataattttgatattccaacgtacttggtttgcttgttttcacgttaatgttttctgtttattggagtgggaaggcattaaaattgtcattgaagactttgtctttgacatgttgtagtatttatttcagtaactaacctgtgaaaagttaaattcctttatgaaagtagtgattggagtatttttatctgataaagaaagattaataatgaagccatttctccgaggaaaattgaggacaataattcagttttaaaatattatcgcaaaattaaattattctaaaaatttgttagtagggttatatgcttaatattagtctgaaatatagtgctgaatttgagactatagaaaaattaagtgtatttagggtatgtggaaacgttaggcttctgttgtatttttattgtttggtagatttgcctcttttcaaataaatgttcacagggaatacttttaacttgtagagagtacagtgactattgaagttacctaaattacctcaaggtaagtgattactgaaattaatcatgagggttttaaaaagtattctattcacaacatttattttacattgttttgtatctgctaagttatatttcctgaaaaacatgactggaccacctaattgctgtatgataacttacaaacttcatttttcatagtgcttattcaagtgtaaagcacaactgaaaggagtaatgtacagtttatatgaggaaaaaggaattttattgctgccagtgtaaaagtttgcacagcagtatagtcatcaatgcagatttacattgcttataatatactaagtaaatactaaatgattaaagataataaaatatggtgaggtataaccaccttcattttaaacttagttttagaagatagtaaagaaagattcctttattacctttttagaattttatttttaataacatgggaaaggcaactggtgatattttaatttttgtatggaacagtgcatctgctttctcatagccacataaaatacataaacttcttagtgttatgaaatggcttactttttggaagtgaagaagtcttcaattcttattttctaatgttattttgaaatttgcctccatttgctgtttgttcatttggtgatagcgcaacacttaaaaaaatattttaagccgcttctgaagtaatcacttcagtgacttttaatggaggagtatttgttatgggaaattcacttcacaaagttttaacattaattcacttgaagtaaacgtgctatttttaaattttcatctcaatcttttaagtaagacgaaagcttaggaaatcacttttattattgatattgtgtgtgacttcagagtttgtaaagagaattgtagaagtgttgcatgcatatgacaattttctgcttaattgaaatgtgaggcctctgccatactacaaggatttagcttccagaaaatgtaatattaacatagcttaagaaatgtatttttttttttctgtagaaaccgttgggttaaacaaacagttcagaagttttattacatggaacccattagttcttaatcttgttacctttttcttcattttttctgttaaacttgattttcacagtcagcattgaagaattcatcttgtggcctgaattcattaagaaaagatgttaggatttgttctgaagatagtgacttaggaaatttgtgagactggggtcagtcagttctgttttacaattgctttctatttggtagctttgaaattaatttagttgcttatcagagagaataatgttgaggttagactaaccttaaattggtaaggctttgctgagcaaactgataactgtaagtcttttatagggtgcattactgccacatatacgttcttccataggtggttaaaagtatattggtctgtgtttggtgattctctttgtacatattgagtatatgcattcactaatgtaaaataatttgccaagaaaggtgaaattagtatattgtacttgactattcacctttcccttagttttttgaatttttttcattggttgcagaggaagtattagcaatttaattcttttaaaataatttgcactggaataaataagtatcggcaaatataagaagagtaacataatttaagggtgaattaattttatttgggaagttttagttctgtatagttaaggcagattcttcatttgcaacagttgacattgggacatgtgtgaacatcttcaaggtattaggacatcttcaaggcattactttttggcagtgttgagaatttttttttttttttttttttttttgagatggaatctcgctctatcgcccagtctggggtgcagtggcaggatctcggctcactggaacctctgcctcccaggttcaggcgattctcctgcctgaacctcccaagcagctgggattataggtgcatgccaccacgcccagatagtttttgtacttttagtagagatggggttttaccaccttggccaggctggtctcaaactccagacctcaagtgatccgcctgcctcggcctcccaaaatgctgggattacaggcgtgagccactgcgcctggccagtgttgagaatattgagagatggatattgtagctgtacctgccatcaaaagaattttcttgacctccacatagtgtgaaaaagaagactgtttacacattatattttaagtaattatacacataattattatcagtactcaccacttcaaatatgaacagtgaatctaaccagtgtttgatttctctgtgtgtgtatgtgtatacaaagttagcaaaccttttatcttaatatttattaaaaaacgaatttttgtttctttaaagaaaagactaccttagagaatattgttctatagtttttaaatatggtcagatctattttaaattatgttaaaattttgagtattacgtttatctatacttttaagcatatatacattgtttcattttagattttagggaggcagtgtgggctctggagccagactgcttgttttgtaatcctggatcttccatttagtagctggatgactttgagtaggttatttagattttctcaatctattttatctgtaaaatggggatgataatggaacctaccgcatacgtttatcttgaatagtaagtgagataataataagtaatttcatttagcatagtacctgccacattgtaaatacttaaatggtagctactgctctgaaaaactgtaatttcaggttatgtatgtagggaaattatttgtattttcatttatggtgtatgattgtaactgaatttcctcagtttgggccatgttaggattttgtttcaagttataagtgtttttaaaaataagggtattcctttaggaagtctgggtatgacatgtctgtgattttgctggttcatcacaaatgggaaataaatctctgctaactcaaactgttgaccaaagtaaaattaattatgccaatcaaaaactatttgctttaaaatataaaaggcaaaaacttcctattagcataatgaagtagaatttttaaactttgttataatcttaaattttctttagtgttgaagataggtcaacttaactatcatacatttttattcacataaagtaaactctgcctcaaatgtaataaacttaatatgagttatgtaaactttggtcaatagaggtatattttttagcatttccttttgaaaatttcagccttttgagggagtcttgcaactgaatgtcaagttacatttattacaataaaatggacacttaatataatctgtaatgcattaacataatatgggaacttttaaagtattcagtctctgtattattgagtcctatttccacatttggccaggattctcaatatgatttaggcccaagacgtgggaagaaagaagtaaagaactaaaggatttttttcttcatttttttaattgaatatggggaaagatggaataagcttatctgtccagtaaaggccattatgtgtacatagggattattatttttcccccccttgggctgtactgatttcccagatgtaccacagcactcttagtagtgaagcacttgacttctagtgagtggattttttgtgtgtgtgttttatattgcagagtgaatacactctgtctgatactatgtgactttctgattatgtgatttttatgcattttatgtgttttgtaaactagctgtatttttggtccatgtctaggttgtagaattgaattgtgcattttggcatctgagcacagctgagttttctaaatcaatctctctccttgcacctagtttttgctttagatcactacctaagacttactgttgatttaatattagagcacttaagcatagctttgacttttatttcctttgatttttgtagattttcaggctgaagtacaataaggttctctgttctttactagtaattgcaaagattgtattctgtgaattttatttgtttaatacttttgatcttttgaagaggatgtaattatttaaggtattatgaaatgcattgtgatttgaattagatactctttggagatggagttttgctgttgttgcccaggctggagtgcaatggtgtgatctcggctcaccacagcctccgcctcctgggttcaagcaattctcttgccgcagcctcccaagtagctggaattacaggcatgcgccaccacgcccggctaattttatattttttttttcagtagagatggggggtttctccatgttggtcaggctggcctcgaactcttgacctcaggtaatctgcctgtctcagcctgctaaagtgctgagattacaggcatgagccactgcgcccggcctcagatactcttttaattagatgcgtttaaaaatttaacccaccattgctggcatgaatagatgtatttttagagtgattcataaatatcgtatacatgtttaaagttacaaactttttgcttatttcaaaatgcaggattcttttccatttaaaattccctctctttgtgagacttctttttgagtattctggttactctaaactgattggagatgaaattagatagaattgaaaactgtacttttaaaatgaaattttggggatgtcattaagcttgattttttaggttttttttttagtgtgtattataaattattttacactgattgtcagcgataaaatggaatgcctgggattttttaaaatttattttattcatttttataaggtaaaaacagtgttttgctaggcttaatttgaccatgttgtaaaatttattgtataccttgaaagaatcatttatgaaagatactgaattagctaatatatactctgtcttatgtagtttttgattaacaatacactttttaaatcattagctcatttgattttgcaaagaagaacaggtaacctaagaggcagacagaacaggcattacttttatttttctttcttttttattttatttatttatttatttatttattttttgcagcttaggaattgtagctccagtggaatcagtatcttgttaatggctagtgaaagactgagtctgaagaaggatgcaggacttttttggcacttggtgcagtatttttcccattatgttacatgagtggttcttaaacttcagtgtgttagaacaacctgaagggcttattaagctatggattgcttactccaccctcagagtttctgattcagtaggtctggattgggacctgagaatttttatttcttagaagttttcaagtgatgctgatgctggtgctctggggatcacactttgaggaccaccaatgaacattatctcccaccaagcaaacccttaacatgttatactcctttaggttattagaatttatacatgcattatttcatttgacctgtaaactctaagtaactttgcatggaaaatgttatcctgattttatagacgagatagtgagtttagaaaggcagtatggtggaatggagcatagatttggagttggctagacctaaagtccagattaaatctctgctcaaggctgggcgtggtggctcatgcctgtaatcccagtgctttgggaggccagcgttggcagattgcttgagtctggaagttcgagaccagtctgggcaacataggcagaccctgtctctacaaaaaaaaatacaaaaattagtcgggtgttatagtgcgcattggtagtcccagctactgaggaggctgaggtgggatcacctgagactgggactttgaggctgcattgagctgtgattgggacactgtactcctgcctgggtgacagagtgagaccctctctcaaaaataaataaataaatacatccccgctcagccacttatcagttacgtagatacactgcctaaccttagtgaaccctgtttcgacaactccaaaatgggagtaaaaatcctaaacttgtacagtggttttttagttttgttaaaagtacaggtgaggtttttttcagagtattggttgccatctgagagtgatcccctttcacctcctctaggacttttagcattttctggagacattttggtggtcacagctggggtggtagagtgtgctattggctaggggcttgaagccagtgatgctgcttaacatcctatatggcacaagacccctccccatcaacaaagaattatctagcccaaaatgctgtgtaaaatgtctggtatataataagtataatatttgatgaaaatcagtacctttgcccccaggtgtgatatttaagaaggtcaacttactaaatcagtgatggagttagtcctaacatctgggtgttctgactgctgctaggccagtattctttatatgataataagaactttgtccacagaagatatccctaataacaaaaaaggtttatttgaagaggactcatgtgttctttggctgattgtgaaagtgttgctttgaacttctgttagaaaaggttgaagatgttttccgtaagtgtttttaatactgtacgtagtattcagaaggatgtttaattttttttttaattttgctagtagtttttaaagtaatcctttttcctttaattatgtagttgttgaactgttgggagttacttttctcttactattttgttatttaatgtattctttgaccttatgcttttttattctaaagctgcttttattatagtcagatatgatgaagttaaatgtacaatgtaaaattgcaaatttccaacgagctatacaaacttaaatatttctaagtaaagaaaatagggctgactctaaggttctttgatccatgtgttgcattcttttctaggccctaaatttgctatgccagcctgttgaattaaagtgctttatttatctaaattagaaacttgtattaaagtgaagttttagaaaaaaagaaacaaaatcggaatggagttttaggttagcccagagatgggaagatgccaagaaggtagctttagtggattctgaattttttggttttgttttgtttttagggcaggcaaatgtaattacaaaagggttctaggaatagattgctgtgattttttttctgtttgcatgattttacagtttgctttgcctctcacttttgaatgcagaataaaatgtcaaggccttatttttttttaaattcttaagaaatttaagatttgactgttaattccttttgaaatatgggatattttgagataccaattatttaagacaaataggactcattgttacaattcagttgaataaggcttatgatgtttatttcagtatatgaatgaaaactatgtgcttattgtacttaagaaaatttcttttattaaaaacatgactaaagagaattttaaaaatcacccactgtcctacttctctaaaacttaatgttttcatattagcttccagttttgttcatatgcatatactttaaaacctagttcatggtgaacttaagagggtgttctttttaaaaaacaatttccattgcactttgtcgttgccttaattaaatggtgaaatcatcagaaatatttattttcctatacttatacatttattaagcttgtttccatttttttattttgtgattttttaagtggatttaagataacctaaacattagagaggattttcatggttttgattcatgaaatcataatgttatacaaacctaactgaagtgttagagccttgaagatttttcccccgaattacatatagtaactctacttgtatttaatactgaaagcatattttacttatttaagtgagacaaagtaaaatttagctgaatactttagatctatcatttccttttcctgttgtaagaacattacattgtgttgaaattaaagtggatatagaaggtaattagaataaactgccacatcatttttatagtaaagtggtaataacactattgctttctgtttttttaatcagaaggagtatgggcttataatgatgttactgttccctgaagcatattttgaatgatacggtttatatttgcacagttgcccaggtaatcattgtgatattaattgatcaatttgctatttatttgcgttttaaatcagtactagtatttgtgcttaaaaattttgcatatgttttatcagatttaatttttaagtgtcagatactaaaacaaataaccttaactttattaaattataattttttatcatgaggtggtattcatttattcatatagttagaacaaaaaatatttaaaatattgaggtagaaacaaattagtctctttttaattaaaagccagattacttgttagagtaacattttcccaaatgaggtaaaattgttgcgactgttaaacttaaggaaattttgatctaggtgtggtatataccttcttgtggggtgctaatgaaaacagggatggcaaaaatattttgtttgtgagtgtatgcatttatgctttttgacaacctaagaaacactcttacatctgagtatctttcatggactagctgtaggaaatctatataaaatagcttagtatactgaaagtatgacatagttttacatatctagattgtggttgtgattatatataatactataaaatatgctaacgtgctgcttaataatactatttggattttttttaatactgaaaaggtcacacagattgtgattattgtgtagtgtccaagaactaaggcctaccatctgttactcaaatgtatgaaaaagttaagataatttagtgatataagtggttttgacaccactgtttttggaataatctaattatgatttttataaagactaatatcaaattttaaacgtttgcaaaaatgaaacctaatagttatactgttatttatatttttctattacaatacagatactggctgagaactaaagattgtgtaataaacgcctggccttcagtcatttggttttttttttccctcgattgtttggatagttaactggacatcatgttttaacttgagaaattaagttatacaagattttgatattttaaactagttttcctaactggttgagatatataagaatttagtattacaggactcaatcagggaactgatttaataagaatttcttaaaaatttgtttaaatatttttcaagttcttttcttcatcttctacaacttaattcttgtctgtatgcaaatgagcttccccatttaaaattttgctgttgcattttaggccactatagaagttgtttctttaattttcactcacaagaatttggtcttaccaaattgtgtaaatctttaaaattgtgtatttggcttaatattatagaatctgattgatttaatctaccttgtttcatttagtatgttgacattttcttgagaaatttgttatgccaaatgattaacataataatattttaagtttagatatgattttgaatttacattttcaaatgcaactttgtgtctgtggccttttttttttttttttttttacgagaaacatcttgccaattttcagattaatctgtgaggaaagtagattggtttactagactcagtttgtagactttggtgagaactgaattggaggctatgaaaaaaataccttttgggcctttctgaatagacatatatacataaattatatctcttacattaagtgaggcacatatgtaggtgagatttttacctgaatattaaaagtttaaaagtcgttacctattctgtttacttaatagtatttaaagggtgtgagaggtgttatgtgtttctgtcccttgtttttattcctatccctcccatctaactgttggtactcttatcttcccaggtattaaacttgtatgttttaaaagcttatttacttgttgaaatggttaacttaattagttttttctttgaagtttcagcctaaatattttctgtttttttatatgtcctttaaatatgaaaattctacagctaatcataattagtaattgtactttttcccctattacaataactggtttcataataaaatggtatcccttcaataacaagcatttatagtagtttattaaaactaagggtgttatctattcaaaccaagcaatgcagacttactgttgactctgttaatatattttaaaattgcatattactaaaatttaaaatatgattttgactagtattttggtgtatgttattttagatattttgattatgcactacttaagaatgaattgtcaagtatgattataaagttgatataatagttaaccttcagtgggaataggaatcatttaatattgttagatatttgtattattagaacaatctcctatgattcttactaatatagtaatgaatgacagacaatatgttggctttcatatttaaaaattcacatgcatttctagtttatgtttttcttcgactaaaattctgcagcacttaggcaaagctatttttaccagttggaaaaaaagtaagtcatttccaaccaattttcctggcttgtagtatagaataaagagacttgattttattacattaaagccaaatataaaatgatgcaatctagcacacacttgtttggaacttttctcttttaaatattcagattaagaggacgttgaaaggtaaatttttttttttttttgagacggagtctagctctgtcacccaggctggagtgcactggcacgatttcggcttactgcaagctctgcctcccaggttcatgccattctcctgcctcagcctcccgagtagctgggactacaggcgcctaccacggtggcgcccggctaattttttgtatttttagtagagacggggtttcaccgtgttagccaggatggtctcgatctcctgacctcgtgatctgcctgcctcggcctcccaaagtgctgggattacaggtaaattttgattgttattagcaactataaaagttttgcagttggcttattggaaaaagaaaacctccttgccggagacggagacgcatttgtattagaactttgttttctgagtaccttacctatagtaggtttcaaatattggtgaattagttgatggttaggtctgcataattactgcgtatggaaattctggaaccctattttttcaaaatgcagctaatgttgagagaatatgcactaaatattactagatctttgtttttcaagatgctgatatcccttaacatcttctgcactttacctgtttgaatatcttttttgctgtaaaaattagtggccttatgtctttctgcataattatagagtagccaaaacctgttttaggttaatcacctctggcaaaataaatgataaaagcatagcttttgtaagcagaatgatattacagaagttaacttataaatctaagtgtattaaagacacttaggaaatttatgataatgctgggtcagcattacagttttaactttttacagtttttcatatgctttttttgtgattttgctgtagaaaattaacagttggcatttggcttagttcaagtataatgctgttgacaagtatatctgacacgtcattgaactaataatatttttgaaagctgataggtaagttatatctattttgtttcattcgtcattagtgatcggtcttagatgtttttagcgagagcaaaactgtagaggaatgtgtgtctgtgtgtgtatatgtgtgtgtgtgtgtgtgtattttaacagcaggagagttctgaaacaggaaaccagtcttatcatattcatccagagacctaggaagaaggtaattgtttggtatactcgttaaaaccagttggttgggcaacttaaatttttagaggatcacagatgtaggcttgagcagttgtagatagatgatttctttttttttctttcttttttcttttttttttgagatagagtctctctctgtcatccaggctggagtgcggtggcgcgatcttggcttactgcaacctctgcctcccaggttcaggcgtttctcctgtctcagcctcctgagtagctgggattacaggcgcatgctgccatgcccggctaattttttgtattttagtagagacggggtttcaccgtgttccccaggctggtctcgaactcctgagctcaggcaatctacccacctcggcctcccaaagtgctgggattacaggcgtgagccaccgtgtctggcgatagattatttcataattaacacctgctatgaagaaaaattgattaaaatagttgagaagtctagtacactctcagctaatatactaaattatactatggattttagagtattgttaacattatcagtgacttgatatcttcctgaggttctaatttgcttaactttaaataattggggttcagatcaccttgattgttcccttaaagattaaattttgtaaaactgtgtgtaattttcctgtatctggtttggatagctttaaaaatggttcttaagtttaatgagttcaactgggaaaaaagttagttctattttagatgttgtgtcactggaaattatgtttccctgtttgttatatgcacattattacaaagttgtaatcaatgttttcatactgttctctggtctgtttttttcacaaatacactttttatttgtcgccaggtacttatttttaaagctatagaggtaatatttcatcaggtgagggtaactaccatggtttgtttgctatactgtgttagggttattttcgttttttttttcttttataaactatagttgtgaatatgtttatatagtttacttttggtttattagaatatattgctagagtgggattacaggattaaagagtgtacagtattttagttttttttttttttttacaagttgcagatttgttgccaaatgaacgagtttgtagtattgctaacaaggagaagaattactagcaagtcttgatgttacttttgaagagtgtgatgattgcatttaggaagatatctaaacttctgtttcaaagcaaaaagtatgtgcaaatttcttactcatgacaaattcatataatataaaaacatgaaagttgtgaggtcaggttgtttggagaagtagaaaacttcagtagagtttatagataggcagtcttcctttctggtttggcactgacagcagattaactagaaagtgttagaaggaacctaaaatttatactaaagtcaatttaagttaattaatataccagaattccttcttttacaatttatttataaaaacaccatattgagttgccttgtaatgagacatttaaactaaatttaaataacagaattcatgcaccatctaataacaaccccttatttacaattatagagtcctttgcaattttatagatattttcatgtatcccatttggtccttgaaacaattaatgaagaagttacagcaagtggtattatcattattttacagaagaacaaaacaaaaatatatgtggcccagagattgagtgatttacctgaggttataggctttagattgcatagctggaagtagaaccttgttcttctatattaaatgacaatattcattaagtacttagcacaggatttggtacctagtaaatatttaaatgttcctgtgttattcctgactattccttctttattcttaaaacgccattttttgagcactcttaatatttatagttcaaactttgtacctatgtacctttttctctttagaaaataagatttcaggctgcattaatttgatctgtacaggaatgattatatgttttacatattgggacaaattgctctttttttatataccttaagctctagggtacatgtgcacaacatacagatttgttacatatgtatacatgtgccatgttagtgtgctgcacccattaactcatcacttacattaggtatatctcctaatgctatccctcccccctccccataccccatgacaggccctggtgtgtgatgttccccaccctgtgtccaagtgttctcattgttcagttcccacctatgagtgagaacacgcggtgtttggttttctgtccttgcgatagtttgctcagaatgatggtttctagcttcatccatgtccctaccaaggacatgaagctcatccttttttatggctgcatagtattccatggtgtctatgtgtcacattttcttaatccagtctatcattgatggacatttgggttggttccaagtctttgctattgtgaatagtgctgcagtaaacatacatgtgcatgtgtctttatagcagcatgatttatactcctttgggtatatacccagtaatgggattgctgggtcaaatggtatttctagttctagatcactgaggaattgccacactgacttgaactagtttacagtcccaccaacagtgtaaaagtgttcctgtttctccacatcctctccagcacctgttgtttcctgactttttaatgatcactattctaactggtgtgagatggtatctcattgtggttttgatttgcatttctctgatggccagtgatgatgagcattttttcatgtgtctgttcgctgcataaatgtattcttttgagtagtgtctgttcatatccttcgcccactttttgatggggttgtttgattttttcttggaagtttgtttaagttctttgtagattctggatattagccctttgtcagatgggtagattgtaaaagttttctcccattctctaggttgcctgttcactctcatggtagtttcttttgctgtgcagaagctctttaggacaaattgttcttaaataatgaacagttggcactttttcaactggaaaattcaaggaactgctctttctgctttctgctcaatatgaatcttcaatttagaaatgagagtccatcattaacaattcaacatagcttattaataggaaaaaaaaacctagtaacaaatgtaaaatctttgattaaatgagaaagtcatagaagttcatcagatttgtatttaaagcatgatttcattagaaaagttgataataaggatttaactgtgacataattggaaaatacttgtttaaacttaaaattttgaaaagaaatgtaaatgtgatgtaacttatgaatcagtggttgagtttcttttttgctcacaagaaccctaactgtgtgttacttgaaagcactgatggaaatcagggaaaaagctccagaagttcctacgaaataaaattaaatgataaagtcctggtatctgctaacttgccttccattcctgttatcttttcttcttagtctgacttcattaattctttcaccctggctactggtttagctcagtgttttatgagccaggcagcttcagactttgcttttgatgctctttgttcattacctctaaagctgtattatcactttcattttatcattaatgtttcatgtatatgttatagtttcatattgttactgcaacttttacttagctataatttaaaaaatatctgtgatctgtggaaataattattctatggcagaaaagtagttattgcattttactttataagttgtttaaggataagcatacctatatattaagcactacaaagaaacttttacaatggctttatttttagcaaaccatcatagttaaaataagatttagtgtacatgtcaggaacacagtcttatgaaataaggtttagggagctatttttagttactatatcctacttgaaaattgtagttaaatttctagcatataccctattaatttagatgcaagtacagatttgagataaggtagatacattatttggatgtcaactcggaagttgttcaagaaaagatattttgttatttagatgtaacttggaacatatttctagtgtttcaagtcatgattgtatgcctagaacaggcaataaaaatttacttagctggtaaaacagccacattatttcaaatatagtttagttatattatggattaaattgatttttgtggacagactttagaacttaattgctattaattacattttttctttgggacggtatttgttctttggtgagaaaggattcttgtaacacctaaatcaagactgtccaaacatggcatatgcagtttaccagtcaaaacaaactaatcacttaagatctgtgtattttgttttatttgaattatacctcaattaaaacaaatttagcatgtttacacaaaggtggggggaaactgtctaatatatctgagatctgttggagctggggtgaccatccaacttaggcaagatagctagtaccatgtatgcatttcttttacctttcttattgtatatacagtaatcactgatattatgagaaaaagaactttttaataattcaggagatattttatcgctagtatatattgagtgcttattatgtgccttatatactttggactcatttaatcctcaacacaacaaccctatgtagttcatactagaattattcccatttaaagatggggaaagtgatgtttagagaggctaagtgacttgcccatggccaaagtattagaactgggatttgaacacaggtagcctgattcctaaataaatgaccactaacattaaaaagacataaacatagaggtgtttgttgcaatgttagtcataatacctaaaaattgtgaactagttaaatgtccaatagtagtaaaatggttcattaaccatggtacacccatcaatataatgttatattgtcatttaaaattgtattcccaagtttcgtatcaggaaaatataataaatttttgaaaaatgtaatgggatatattgtatttataatacagtaatcactatgtaaccaacatttttatttccatcaaaaattagttataaagaaatagaaatctaagaagtttaatagatattaccattgaacactagatttgtattagtatcttttatatttatctctctcatttcctatattggccatgtttacttttaaaatagtaaaagtcataagctctattttaaaaataaatgttagtttattaacccaagaataatagctaactataaattcatatttgataaaataaaaagatgacattcatcataagggatacatacctgtgctagcatatggcatttttaaaatcacatgagtaatttgtaatcatcatagaaatattagaaaatacaaataagcaaacacatactgaaaatttagtgttcccaaatctaaaacagagacactgtttttttcttttgggattgtattttagatatgttcttaagttataataaagtaaatacttaaaaggcaaattgatacattaaggatttcaaagagtaaaactttttgttaagctttgatgttctttagaaagtttagattattccacaagtcactgtcgttgaaagaaaagtagttacagtggggtcttatgggataaggcattaccatttgttcagttgagagacagctatcactatgttttaagcattgttcatatattagctcatttaatcctcatagcaaccttatatgataggtacctttattagccccattctgcttaggaagcaacagaaagagtatgtattttgcctaaggttgcacaataagttaagctggggttccaattctagcaagttggttctagagtgtatgttattaaccattatgccgtagtgcctgcaagtagatctctagatgtcagaaatactcatcttcctctggttacctggttgttataaatctttatgcttaatacttatgtcattatatgtaaatttcgtattaaacactcaacttattcagaagaatatcaggtaagtgtaggttaaggctgttttctatcagaaatcattatatgtatatatattcctcagttcttatgttgtttagtttttctaaaatgtcaaattttataatatatggagaagtataaatgtatattagaaagattttgtttatttgtgtaatttgtggcataagaaatatttgcctcaagatttggtgcttgtttaggtagttgctggcattacttttggaaatgtcagtaaattttcatactgtcttggaattttttcaatttttacattttattagtaaatgtaattacaggttagtaaatcacttatttgaacctgtttcctttgaaagttttatatttttatttggaaatagaaaaaccttaatttcctctcgttgggcagtatggtgtcaaaagcttgggctttggagcttcgtatataatctgggttcaaattataacttactagttactaacttgggcaagttacccagtctttttgactctcaatttctttgtctatgaaatgtaatactatttaggattgttaggattaaatgagaatatatttggcatactgtctggtacatgatacttaacaggtactagttgtctacatctttctaacttaggatggatgccgatgtcttgggtaacatctcaaactttatcagtaaggaaggtgagaatctgaagaaaatgaaaccttaaaaagattgaattcctggactccatttaaaggagtaaatagctcacgaacaagacttgctgctctgcaaagtcttccatgttgatcctggtctttgactccttatctgtctgattaaattgaattcgctgccgtggcatccttaaagctggaccttactttgtcagtcctgccttctccatgttgctttgtgtgtaagcttcactggactgtttgctttttgctgattattttatgtatttccatatgtctactttagcctttgcttggaatgttctaactgctcttgtttcttcctctgtttactggtttctgacttaactcttaaggattatctaatatattacctacttggtgaaggtttatctgtgtccccacagaattaatccttccctctttaactcttaagctatcttattttttatctaatcgggtctttggcacaattataggtctgtgtgtctgtcttccctaatagaataggaaagccttgaggacagtagtctttgcttacttagccttatattctcagtgccccttgtgcaaaacgttcaatatatgtttgaatgattatgtgaatgaaggagggggccagctgaatttactttaatgattatgtaacacccatttatgtatagttatagacttgtctgaaatgagttaaatcctttgcaacgtttgctgctatgctttgaatgtctcttacaaaactcatgttgaaatttaattgccattgtaatggtattaagagatggaacctttaagaggtgattagataatggtatctctatccttatgaatggattaatgctgtttgaatggtagtggatgagttatcttgggagtttggcctcctccgtctcacatgcttccttaccttctgccatgtggtaactcaacacaaagatccttgccagatgctgatgccatgctcttggacttcccagtctccagaaccgtgagccaaatacatttctgttcattctaaactacctgttttgtggtattctagtaaagcaacataaaatttactaagaaaactggtaccaagagtgtgattgttgccataacaaatacctgaaaatgttcaaatggcttgggttctggctagagaaggatggaagagtttggatgaacaggctagaaaaagcctgtattgctgagaatagagcattaaggacaattctgatgaggattcagaagaagagagctgtagggaaaatctggaacttcttagagagttgtcatcagttggtagaactataagtggtaaaggtctttctgatgatatctcagaaatgaagaacaagatactggacactggagtaaaggccatccttgttaaatagttgcaaagaacttggcgaaattatgttcatatcctaagactttatggaatgcagaatttaagagtgatgaactaggatatgctgcagaagaaataactcagcagcagagcatttaggttactggatggctacttttaaccacttaaactaagctgggggaagggaatgacttgaagacagaatttataattaaaagagaggcagaatggaaatacttggaaaatttgcagcctggccatagtaaagaatgcaaaaggtatgtttaggagagcaaaccaagggtgtggtccaggaaccatttgctgaagagattaatattcctagaggagacccaagggctatttatcaagacagtggaaaaagaccccagaggcattttggagatctttgaggctgcctgccccatcacaggcccagagctctaggagggcagaatggtttgtggctcaggtggtccttcacaagcttgctgcccagggctacctcagctccccatatttcaacccagtgggccttggctgtcctaggtctggttcagaggggcccaggtgtggcttaggctactgctgagtactcaaatggtaaaccttggcagcgtctatatggtgctaattctgcaggctcacaggatgaaagagctgtgggagacatggctaccaccaccaggatttcaaaggatgatggggatagtctgggagagacttgccacaggcttggagcctctgaagggtggaaatgtgggttggagtcactacagagagtccctactagggcattgcataatggagccatggcagcaggcccaccaccaaagcttcagaactgtagagctacaagtatacagtgccagcctgggagaacttcaggcttgagaccctaacctgtgaaagctgcatgggctaagtacagcaaagccatggaggtggggcttcccagggtctattgggatgaaacgaatgtattttgtaggtgagaaggacatgagttttgaggcccaggggcagaatgctatggtttggttgtttccttcaaaactcatgttgaaacttcattgccatgtggcattattatgaggtggaacctttcagaagtggttacattataagggctttgccttcattaatggattaatgccattattgcaggtgtgggttagttatctctggagtttggccccctttttctctatcatgtgctcatgccctcttttgccatgtgatgccttctaccatgttatgatgcatccagaagactctcaccacatgcagccccttgatcttagacttctcagcttctagaactgtgagtgaaataaacttcttttctttataaattaccccgtctgtggtattgtatagcagcagaaaatagacatcagcctgaagttcccccaggctggcattaaatactaattattaattagtatttatagtgcaaggataaattcaagtttagccctggttagaatgaccacatttcaagggaggggctttgtacttctgtgcatatctgtaaggataaaaatcttaatactattctcactgaaattaatggtttaggttaggtaaggttgttagtgctaataattatttcttttaataaaatattcttagttgcgttgttcaaaaaacatagatgatttgaatttatattttttggccaaaatatatttataattttgagtaggaattccagagtattggtagctataaccactttgggttccctgccattgcttctggtgcctcattttttctgacgtcttccattttcttacatttgtcttctaaggtggagttaagattactcagttaagattatttcactttaggcctctgctgtcttctgcttttttttttaaaatgaatggatataatatcccaatacattttgataattgaacaacagctacatttttaagtgaggctactttcttctaattttttaaatttatttttctcagtttttaaaaaaaatgtcagattggctaagagttggggcagctttcttatgtgagagtagtagatgacagcaaatatttgtgatgttaaaatgataatcctaatagttttcttttagaatctttataataaaaaccctttgaggctgagggtgaatttgtatgttcctaaagtgacaaaaaatgttcttggggcatagtaatttaaatcttagatgcttttattagtataattttttggtagaaatttggcattaaaaaatgcatacagagctttttctacatacagggcaagacagcattttgtcatggcaattagtaaatagataattataaaacatctaattttaagcaatttgttacagaaacgatacaggtacattgtggcaaaaatagaagatacaaaacaagcaaatatgagaaaaaatatacatgccaccacctatatatgacttttagtactttataatcttttgtctatatatgtctatatggatatatacgtattctttttatccaaatggtattacattgtacattctgttttgaaacctgccttttttagtcatttgcatctacttttccatctcagtaacttttcatcttgtgtaatgcccggatcacattaaaatgtttccaattagctcaaaaatgtcctttatggctggtttggctaaaacagtatccaggccagcattgcacctatgaaattggctgttaggaatcttgtatctttaaaaatcaagggcagcaacccatcctcccgcttcccccacctcccaccacccccccaccttttttttttcttaaagatactggcttgttgaagagagaatgggtcatgtcctacaaactgtctgaatttgtccagtttgctgtctcatagtgtcatttagcttgttttatcctatgtatttcctgcaaattaaaatttgtatctgaatccttggtggatttgagttgaagatccttaaccatcatagatgatgctgtgtcctttatattgcatgtcagaagttacatgatctttacttgattcatgatgaggagatggccactgaaattggacagtgacagtcttttctgcccattgttcaattatattcgtctctttacattagaaagtattttgggtagtagtattttggtgctgtaagaaagttcattttctcatcaaccactcacctattggtttaacaccatttgttgatctttgagtatatcagtaatttcatcagggtttgcaaaataagactttaaattctattgttttacattattaattgatgttttttgataaggtagaacttgtgaaatgggactatttgtttgtctttaaatacagtctctataggaaagacaaaataaatacttaaatctcactctttaccatttttcaaagtgaagaactattccgttaaccacctcaaaagatgataaataaaaagggtatttttagttgtttcaactttttttttttttttgagatggggtcttactctgttgcccaggctggtgtgctgtggtgcaatcatggtacaccgaagcctcagtctccctgggctcagatgattctcccacctcagcctgggactaaaggtgtacaccaccatggccagccaatttttttgtattttttgtagagatggggttttgccatattgcccagcctagcctcaaactcctgggctgaaggaatccacccatctcagcctcccaaagtgctaggattacagacgtgaccaacaatatctggccttaacttttttcttttgagtgtctttatagactcaaggacttttatttaattcagggtgttagtaccatttaaatgttttctttgatgctcagattatcacagctagtcatttggacctttataccacctcctatgtccatttgatataggccattaatctctataagccttcctccttctcttggaatgaaaaggtatcctaggctcacctgtaccttccctactccagacctggcattaagtctttttccaaggagtttggtaccttttagtttattatgatattagagatgaaaatctgtgttctaggaatgtttattactgctagagtgatgttgcttttaggccatttcagagaaaagacctagaaaacagatttttacaaacatgaattcatactgatatttttagttttttacatgatttcttgattttacaatattatctgctttcttaacttaaaattatgaaccttaaagtcattagcataacttctttgcttatttctacaacataaagaaaatagtcctggtgcggtggctcacactgtaatcccagcactttgggagattgaggcaggtggattgcttgagctcaggagttcaagaccaacctgggcaacatgatgaaaccttgtctttacaaaaaattagctgggcatggtggcatgtgcttgtattcccagctactcaggaggctgaggtgggaggatcacctgagcccaggaggtcaaggctctagtgagccatgatcatgccaccacactccagcctgggtgacaaagtgagaccctgtttcagggggaaaaaaaagataaaatagtttgaggaggctggatgtagtggctcatgcatgtcatcctggcactttgggaggtcaaggtgggaggatggcttgagcccaggagtttgagaccagcctgtgccacatcatgagacctggtctctatttaaaaaaaaaaaaaaaagaaaatagtttgaggatatcaataatgatattactagaatcagtaaaactaccaaaagaagtttaaagtttcttcctagtgtttttttgttcttagaatacttcctaccaagaagtgcagtaaaagtgcagtgtccaaatagcccttgtaacaaaacctttctctttctcctgggtgccaatttgacatttaatcagttttgtttctagcagtgttcaatttattagattataagtcttttttttctttatattattctaagatcaaaaatatataaagatatacacaggagtcctgctgctacctgttcttgctatgcttttccccttttcttccctttctctgtgaagcagccatttttattagtttcttgtttatcactcatgcatgcatatgtttattgaggatgttgacattcaagcaaatatatgggttaacattctttttgtcatccctatacgaaagatatacccagtatactctattgggtgggtttttttccttaaaatattcagtagatctctccagttagcacatagttatcttatagatagaacatatacatataaccttttcttaaactatgctattaaaataatagctttcagtaacttgataattatttttggattgaaaatactactgaaatcaactcaatcatgtgaaagctgcagaaagaaaaagacctagaaaaagggcattggattaggtcaactttgaattttatttggaagataaatgagtccagaagtgagtgggcagagattattggagttggtcttgaaatgaggcgttaggcagattgactgggctggtgtgaaaggtctgtcagaaaatcatgagattagattgaggtacctcaaaaaatgagagctggtatgatgagtgggtaagaatcataaaagcgtagagtgttgatgatttttatagtttataaatggttcttgtgtgtagagttttgtttttatgctagctatagtctgtaacataattcactataatgggcatgctaaatatccatgacagttgacccttgaacaacacagagggtaggggcgcctacccctgtgcagttgaaaattcacatgtaacttcttttagtttgattgctgcatatttcagatatttctttccttaactaaagtactcagatatttatccaaacattattgctatgggatttcctgcagaaagacttgaaggcgtatacaggaacaatattgatgatgtagtaaggtaagaatgctttgattttctatttcaaatattgatgtttatattcatgttgtgttttcatttagaaaagatttctaagccacagaaaaagatactttgtgatgtaaactattattgtagtgctctataatcattttttggcttaccgtacctaatggacttcagggggatacagttcatttgataagaactgaccttatacattacataatcaggtacttatgtgatatcatttcctggactccataaaatgctggtcaccaggtttaatacctggattccattacagtgtgatttttgtcttatttcatagttggggattaggcttaaaatcctagagtggatttattcagttaaatttattcacactaagatgtagatgactaatactgtatatttttatgtagaccaaattttaaggtaccactgtgcatatgtataccaactacctgaagaagtatttggttggtacaagagatatagaaaggaatcgctgggtgtaccaaggctaatcagttttataattttgcataattttctaactgcgattatcatttagtttagaacaatttatttctcaaggcccatgtaaatattatttttaaaatatacagtcttaagaattcatggcatattttatgaaaggaggaattcatgtctgatgtgcaaatagtcttaacatattttctaatttcagagcaaaaatatatatgtatgaataaattaactgtaaattgtcagtaggaaccttaagaattcgtggcgtattttatgaaaggaattcatgtctgatgtgcaaatagtcttaacatatttgctaatttcagagcaaaaatatatgtgtattaataaatcaactgtaaattgtcagtaagaaccttaatggctttaaaagttaaaatttcaggtcaagcattgtggtgtgctcctgtagtcccagctacttgggaggctgaggtgggaggatcacttggcttgaacccccaggtagagggtagaggccagtctgggtaacacagcgagaacccatctcttaaaaaaaaagtttaagttgtggattatttcctttacactctttcattagtatctttcctggagactttcaatttaaatacttggtgcttatgacaattagatgttaaaatggatgggaaagtactttgtaacttataaagcattatgcagatgtagactccttttataatagttgtgtaagtatataagacaacctacattcttcatgagctagccataagttttagcaacttgctttgaaccacggtagatttacaattttctgtagtattgagttgtgttcatttagaattttgtaatatttatattgaaaatcaaatttttgtacctacaaaaactacaaaaaatccccctagtttttatagtttctattaaaattatagctggtacatagggatgccagaaggactgtttaagaagctgaaaatagagaaatgaatttatcttctcatagttaggcagggcacagtagaaggatgcttaacattgcaagctgatgggaacagcaggttgatatagcttgtgataacacttctaaagaaaaagcaatgagccatagaaaaaagaaaaagatacattttgaattaaggaagatggtgaatctgggaagtgagcagtacagtcaccagacgtgtatcctctcctatggtacagaagtgtttattgggtctctttatggcctgcatgatatatcccacaagatgacctacttcacattattttaattctgtattcaactaagcactaattcaacccagccagattagtactcataccaaaaaagagtgaatactctgaatagagggcaggttttctgattatggtgagaatatctttgtggtaaattaatctggtgtgctagtttttacgttggtctcttctcagtgtcgttagtcactgaggctgattgatcatcttttaggttactgataaagttcctgtacagctgattttcagaccttagattgcaataacttcaccaagaaaatacttcattgggaagcattttggtccttccatttgattcataactcttacctttatgcctctgaaggaaaagatttatacattcagcttgtaattagtaatcaagactgaggtttagtctatctagcttcacaatctatctagtttgttttgtctagccatatgatttcttcaaatatgccatttcttaaaaaaaaatgttttatgtatcccgattaatatttagccagtggttcttttagccgatggatcttgtcacctcttatgatactattaatagcatgtcaacatgaagaattatctgctgaatataatagctatgctgtccttgtttccttttgtctcattcttttttgattgggggataattggccaataaagctttgatagcctctattgcccaggcccctcctcttcttttatgagagaaaggatgaacagtgaccagaaataaaggtattgtttttttctatcaactaaaatggaaataaataattcctaagtaatttgcctgttaggattaaagtctccaagagaatggctgtgcctagtacctaagtgattaatttccttgattggttcacattatattgaggatattagtaatcagtagtgattccttttttggttcaaagatgatagtgtcacagtgaaaaatgtttttaaaatttttgtatacttaatttttctgttaacgaaagtattttcagttggatttttgtttgccctctctattagaatgcccaaagaatatttaaaattttccttttctcttatactgcatatttttcctgtgatttttccccaaacggaaaatactctgcagagattagactttgttattgttgtactacatcattgctttgactaaaataaactcagattgcaaataccttcaagcttacattgctcagtatttttttttttttttttttttgagacggagtctcactcttgtcgcccaggctggagtgcagtggtgccatctcagctcactgcaacctctgcctcctgggttcaagcgattctcctgcctcagcctgcggagcagctgggattatagatgcccgcccccacgcccagctgatttttgtatttgtagtagagatggggttttaccttgttggccagtctggtctcaaactcctgacctcgggtgatccatctgtctcggcctctggaattacaggtgtgagccgccacgcctggctaaattgatcagtattatttaactttgagggatatgatttgttatggaatgcgaagttttatacttgaggtactcagagtccttttgagacaaatatttaacttctccttttgaggttaccgcctacgattgggaattaatgtaaaaaataagccaaaagaaagtgagggaaaagtgaaccaagctgtaatttttttactcttttttattgttgttgttattgttgctgttttttactatcttgattgcaacagtttggcttatatatatagcatttggaattgacagtaagaaagccacatctcatagaagctaactattcccaaattgtttttttcttcttttcctcttactactgctgttttcctcctttcttgctgctaagctcttgtcctgacatgctggtaatatgaaacagtgttttattcagataattgattattctgtaatatgtatgttaatcttttttattacactttaagtaatagggtacatatgcacaacttacagattcgttacatatgtatacatgtgccgtgttggtttgctgcacccattaactcgtcatttacattaggtatttctcctaatgttatccctctcccaaccccccaccccaggacaggccctggtgtgtgatgttccccgccctgtgtccaagtgttctcgttgttcagttgccacctgtgagtgagaacatgcggtgtttggttttctgtccttgcgatagtttgctcagaatgatggtttccagcttcatctatgtccctacaaaggacgtgaagctcatccttttttatggctgcatactactccgtggtgtatatgtgccacattttcttaatccagtcagtcattgatggacatttgggttggttctaattctttgctattgtgaatagtgctgcagtaaacatacgtatgcatgtgtctttatagtagcatgatttataatcctttggatatatacccagtaatggaattgctgggtcaaatggtatttctagttctagatccctgaggaattgccacactgtcttccacaatggttgaactagtttacagtcccaccaacagtgtaaaaatgttcctgttcctccacatcctctccagcacctgttgtttcctgactttttaatgatcgccattctaactggtgtgagatggtatctcattgtggttttgatttgcatttctctgatggccagtgatgatgagcattttttcatgtgtctgttggctgcataaatgtctataaatgtcttcttttggaaagtgtctgttcatatcctttgcccactttttgatggggttgtttgatttttttcctgtaaatttgtttaagttctttgtagattctggatattagccatttgtcagatgggtagattgcagaaattttcttccattctataggttgcctgtccactctgatggtagtttcttttgctgtgcagaagctctttagtttaattagatcccatttgactattttggcttttgttgccattgcttttggtgttttagtcatgaagtccttgcccatgcctatgtcctgaatggtattgcctaggtttgcttctagggtttttatggttttaggtctacatttaagtctttaacatttaagtctttaatccatcttgaattaatttttgtataaggtgtaaggaaatgatccaatttcagctttctacatatgactagccagttttcccagcaccatttattaactagggaaccctttccccatttcctgtttttgtcaggtttgtcaaagatcagatggttgtagatgtgtcatgttatttctgagggctctgttctgttccattggtctatatctctgttttggtaccagtaccatgctgttttggttactgtagccttgtagtatagtttgaagtcaggtagtgtgatgcctccagcttttttctttctgcttaggattgtcttggcagtgcgggctcttttttggctccatatgaactttaaagtagttttttccaattctgtgaagaaatttattggtagcttgatggggatggcattgtatctataaattaccttgggcagtgtggccattttcacgatattgattcttcctacccatgagcatggaatgttcttccatttgtttgtgtcatcttttatttcgttgagcagtggtttgtagttcttgaacaggtccttcacatcccttgtaagttggattcctaggtattttattctctttgtagcagttgtgagtgggagttcactcatgatttggctctctgtctgtctgttattggtgtataagaatgcttgtgatttttgcacattgattttgtatcctgagactttgctgaagttgcttatcagctgaaggagattttgggctgagacagtggggctttctaaatatacaatcatgtcatctgcaaacagggacaatttgacttcctcttttcctaattgaataccctttatttctttctcttgcctgattgccctggccagaacttccaacactgtgttgaataggagtggtgagagagggcgtccctgtcttgtgccagttttcaaagggaatgcttccagtttttgcccattcagtatgatactggctgtgggtttgtcataaatagctcttattattttgagatacgttccatcaatacctaatttattgagagtttttagcatgaagggctgttgaattttgtcaaaggccttttctgcatctattgagataatcatgtggttttttgtctttggttctctttatgtgatggattatgtttattgatttgcgtatgttgaaccagccttgcatcacagggatgaagccaacttgatcttggtggataagctttttgatgtgctgctggattcggtttgccaatattttattgaggatttttgcattgatgttcatcaggggtgttggtctaaaattctctttttttgttgtgtctctgccaggctttggtatcgggatggtgctggcctcctaaaatgagttagggaggattccctctttttctatgaattggaatagtttcagaaggaatggtaccagctcgtctttttacctctggtagaattcggctgtgaatctgtctggtcctggacttttttcggttggtaggctattaattattgcctcaatttcagagcctgttactggtctattcagggattcaacttcttcctggtttagtcttgggagggtgtatatgtccaggaatttatccatttcttctagattttctagtttatttgcatagaggtgtttatagtattctctgatggtagtttgtatttctgtgggatcagtggtgatatcccctttatcattttttattgcatctatttgattcttctctcttttcttccttattagtcttgctagcagtctatcaattttgttttttaaaaaaaccagctcctggattcattgattttttttttgaagggttttttgtgtcctatctccttcaattctgctctgatcttagttatttcttgccttctgctagcttttgaatttgtttgctcttgcatctctagttgttttaattgtgatattagggtgttgattttagatctttcctgctttctcttgtgggcatttagtgctataaatttccctgtatacactgctttaaatgtgtcccagagattctggtacgttgtgtctttgttctcattggtttcaaagaacatctttatttctgccttcattttgttatttacccagtagtcattcaggagcaggttgatcagtttccatgtagttgtgcagttttgagtgagtttcttaatcctgagttctaatttgattttactgtggtctgagagacagtttgttgtgatttttattcttttacatttgctgaggagtgagtgctttacttccaactatgtggtcaattttggaataagtgtgatgtggtgctgataagaatgtatattctgttgatttgggatggagagttctgtagatgtctattaggtctgcttggtgcagagctgagttcaaatcctggatatccttgttaaccttctgtctcgttgatctgtctcatattgacagtggggtgttaaaatctcccgatattaactgtgtgggagtctaagtctctttgtaggtcactcaggacttgctttatgaatctaggtgctcctgtattgggtgtatatatatttaggatagttagctcttcttgttgaattgatccctttaccattatgtaatgcccttctttgtctcttttgatctttgttggtttacagtttgttttattagagactaggattgcaacccctgctttttcttgctttccatttgcttggtagatcttcctccatccctttattttgagcctgtgtgtgtgtctgcatgtgagatacatctcctgaatacagcacactgatgggtcttgactctttatccaatttgccagtctttgtcttttaattggggcatttaccccatttacatttaaggttaatattgttatgtgtgaatttgatcctgtcattgtgatgttagctggttattttgcccattagttgatgtagtttcttcctagcatcaatggtctttacaatttggcatgtttttgcagtggctgataccagttgttcctttccatgtttagtgcttccttcaggagctcttgtaaggcaggcctggtagtgacaaaatctctcagcatttgcttgtctgtaaaggtttttatttctccttcccttatgaagcttagtttggctggatatgaaattctgggttgaaaattcttttctttaagaatgtagactattggcccccactctcttctggcttgtagagtttcagcggagagatctgctgttagtctgatgggcttccctttgtgggtaacccgacctttctctctggctgccctttacattttttcctgcatttccaccttggtgaatctaacaattatgtgtcttggggttgctcttctctaggagtatctttgtggtggtctctgtattccctgaatttgaatgttggcgtgccttgctatgttggggaagttctcctggataatatcctgaagagtgttttccagcttggttccattctccccgtcactgtcaagtacaccaatcaaacgtagatttggtcttttcacatagtcccatatttcttggaggctttgttcatttctttttactgttttttctctaaacttctcttcttgcttcatttcattcatttgatctgcaattactgataccctttcttccacttgatcgaatcggctgctgaagcttgtgcatgcgtcatgtagttctcgagccatgattttcagctccatcaggtcatttatggtcttctgtacactgtttattctagttagccatttgtctaatcttttttcaaggtttttagcttccttgcgatgggtttgaacatcctcctttagctcggagaagtttgttactactgaccttctgaagcctacttctgtcaactcgtcaaagtcattcttcatccagctttgttccattgctggtgaggagctgtgatcctttggaggagaagaggcactctgggttttagaattttcagcttttctgctctgttttctccccatctttgtggttttatctacctttggtctttgattatggtgacctacagatggggttttggtgtggatgtcctttttgttaatgttgatgctattcctttctgtttgttagttttccttctaacagtcaggtccctcagctgtaggtctgttggagtttgctggaggtccactccagacactgtctggatatcaccagtggaggctgcagaacagcaaatattgcagaacagcaaatattgctgccggagccttcctctggaagcttcgtcttgggggcacccggctgtatgaggtgtcagtcggcccctactgggaggtgtctcccagttaggctacaagggggtcagggacccacttgaggaggcagtctgtccgttctcagagctcaaacactgtgctggtagaactactgctctcttcagagctgtcagagagggatgtttaagtctgaggaagtttctgctgccttttgttcagctatgccctgcctccagaggtggagtctacagaggcaggcaggcctccttgagctgtggtgggctccacccagttggagcttcccaaccactttacctactcaagcctcagcaatgatggacgcccctcccccagccaggctgctgccttgaagttcaatttggaactgctacgctagcagtgagcaaggctctgtgggcgtaggacctgctgagccaggcacgggatataatctcctgttgtgccatttgctaagaccgttggaaaagcacagtatttgggtggcagtgtcccaattttcccggtatagtgtgtcacagcttcccttggcttggaaagggacatcccccgaccccttgtgcttcctgggtgaggcaatgccccgccctgcttcagctcaccctccgtgggctgcacccactttccaaccagtcccagtgagaagaaccaggtacctcagttggaaatgcagaaatcacctgtcttccgcgtggatcatgctgggagctgcagacaggagctgttcctatttgaccatcttggaatgccacctttttttttttttttttttttttaaggcagtttcttgctctgtcacccaggctggggtgcagaggcatgatcacggctcactgcaacctctgccttctgggctcaagtgatcctcccacctcagcctcccaagttgctgggaccacagccacgcatcaccaggcctggctaatttttgtgttttttgtagagatagggtttcgctgtgtttcccaggctggtctcaaactcctgcgctcaagcgatccgcctgcctcagcctcccaaagtgctgggattacaggcatgagccactgcacccggccaatatgtatgttaatctcatccctcaagctgatactgaagtttttcaatttatgttatttggtgtaaatctaggcagtctttaacaaaattggtgcttcatgtgtttaagaggcataacttaagaattgtttgtttcttataaatcaggagaatggaggtttaatagaggtgaactgtctttctcactgcagaacctttaatatgccactatgcattgtaaatctcccaagagtgagattctagtatgatgcttttcttttccttttctgttctttccctttccctctacctcctttttcttttctttgttggtggcatgagtcctatattataaggaaatgcttttagagtacagtcttctgatatatagtgatttttgaaaaagatttatttattgtcttgttcactgtgagctttttcccccatgtataagcagctgtgtaatagattcaagagcaccccctcgcccctttttttttgagacagagtctcgctcggtcactcaggctggagtacggtggtgctgtgatcatggttcacctcgacttctgggctccagcgatcctcccacctcatcctctcaagtagctgggaccacaggcgtgtgtcaccgtacatggctaatttttctatttttagtagaggcagagtttcgccatgttttccaggctggtctcgaactcctgaactcaagcagtccacctgtctcagcctcccaaagtgctgggattacaggcgtgagcctccactcccagtctcaaatattcttttgaaatatttgaaatatgttgatctctcagtctttcaaccttagttgtatgttgattttcaataaaaaggaagtatttgttgccctaacatcagtattggctattcagtttaaaaaaggagttaaagagatgttatttataggcaggcttcaaaagaggaaagaatgatcagtttcattctctgtttctagcatattctgactccttctctcatattacctcgtttttcccacattttttctttaataaagtgaaattcacataacagctaaccattttaaccacggaaagtgtacattccgtggcatttattaccttcacagtgttacctctacctttatcaagtttcaaaacattttatcaccccaaaagaaagccctgttcttattgggtgcctcttgcttttttttttttttttttttttaaatcttgagacggggtcttggtttgtttcccaggttgtagtgcaatggggcgatctcatctcattgcaacctctgcctcccgagttcaagcaattctcctgcctcagcctcccgtagctgggactacaggcacgcgccacatgcctggctaatttttgtatttttagtagaaacgtggtttcaccatgttggccaggctagccttgaactcctgaccttaggtaatctgcctgccttggcctcccaaagtgctgggattataggcgtgagccaccgttctggccacctcctacttctttcattagtcttaattccttagtggatttgacagtgtttatattatctacaccaatgcatttttttgtatgttaataataggagatatttattgggcatttatttacatacttatttgcatgtgtaactgttgtatagccagtttatgtatataatcttactaaatctctacagtaaatctatccccatttcatagatggtttaaaagaagttaacttccccaagcattacttttagtaagtagtgagactgaaggttgagttctggtctgtcagattccgaagttgtttccttaggaaccatattatcttgtgtacaactcttgggctaatcttgttaatattctttatttgacctcacactgttgattcataccatgtttaaaattgaaatacattacctatatttaaaaattgagacctcacataaaaagctatatttctagctgcttttgaaatttcgaaggatcttccaacacttggctgacattcctgcgtgacaaaaatcagctggagctgtgtaatgtccgacctgtctctgtcaatgaacagattattcattgtcatttctcatctgtttttgagattgtaactttgattctgtataactcatagaattagtagttagacctatatatgttagttattacattatttgtatatgtacagactgctttagacaatattgtagtgttatatgttaattttatcaattaaaatgtgctataggatcattgtagagatcttgtctctaattaacaggattcataaagagaaaacaaaggagagaaacatccagattgaaaagacctacatagtgccaagcacaataaaagaaaccctatactaggcaaattattatgaaatttgttttaggacaccagaaataaagataatatctaaaaactttttagaatcgcctaggagggattaggaatatgaatagcatctaacttgttggcagtagaattgaaggtagaaggtggtaaaacatcaccttgaaagttctgcattcagcctagaattctgtatccagttaaaccatcaatcaagtgtgaaagtagggggaaaaactcaaggactaaaaaaatgtgctcatgaagaacattttttttggacattacccagaagatgtggttcaacaaaacaagggaataaaccaagaaaggaaataaaagagcttcagtaaacagagaatcccactcagaagcaacaaagaagaaagtcccaggatgacagctgtgacacaagctgaaaagttaccagttttgcttggagcaggagattagaacttccgggaaaataatcaaattgatagatggatgttgaaatatttggagaaaaatgtaatggattcttgcaaaactgagcaaattagaaaaaggaaacaattattagcattggtggtttgagttaacccaaaattgtgatgttgctattttaggggaattaagataagtgaaacacgtatggaatactgctagttttgtaagtctcctttaccatggcaggacatctgtagttaataaatctgtaagaagcagtattaagaataatattttaaaatacctaattaaataggaggaaaaagaatccgagtagttgagggtgattgcatctggggagaagcaggaataaaggtttgaagataaatagggccagagatgagtaattttgttactgtgataatatattttatatatatgtgtatgtgtgtgcgtgtgtatatatatatatgagatatatctcatatatatgagatatatatgatatatatatgatatatatgatatatatatataaaacatacagttcagtagcattaacatctagcattcagtacatttacattgttgtgcaattgtcaccactgtccatctctagaactttttcattatcccacactgacataccacacccattaaataataactcctcattgctcctcctgttagtaccaaccattgttctactttcatctctatgtatttgactattctaggtacctcgtataagcggaatcacgtgatatctttttgtaactggcttatttcactaactatcttcgaggttcatccatgttgtagcagttgttagcatttccttccttttaaaaggccgaataatattccattgttatgtatataccatattttgtttatccatttattcatcaatagacacttttggctgttgtgaataatgctgctatgaatatgggtatgtaatacctgtttgagtatctgctttcatttcttttggatatgtacccaaaagtgagattgctggattgaatggtaattctatatttaaatttttgagaaaccaccatactgtttgatatactggctgcccaattttacattaccaccagcaatacactagggttccgaatttgccacatcctcaccatcgtgttgttttgtttatgtttttttttaataatagccatcctaatgggtgtgaagtctcattgtggttttaatttgcattttcctaatgatcagcgatattgaacatttgcacatgcttatttggtcatttgtatatcagctttggagcaatgatgtctcttgaagccttttgcccatttatgaattgagtagtttgggatttttaaattgtgttttagaagttctttgtatactctggctgggcacggtggctcgtgcctttgggaggccgaggcaggtggatcacgaggttaggagttcaagaccagactggctggtatagtgaaaccccatctctactaaaaatacaaaaattagctggtgtggtcgggcgtgatggtgcacacctgtagtcccagctgttggggaggctgaggcaggagacttgcttgaacccggaaggtgggggggttgcagtgagctgagattgtgccactgcactcagcctgggtgacagagcgagactctgtctcaaaaaaaaagaaaaagaagttctttgtattctctgaatattaatcccttattggatatgttatttgcaaatattttctcccataaagaatgggttactttttcactctgttgattgtttcctttgctgtgcaggagctatttagcttgaaaaaatccaacttgtctgttttcttttgttgcctgtacctttggtgtcacattcaagaaataattgccaaattcataccatgaaactttcccccatgttttctcctgaaggtttttatagttttagctctcacatttaggtgtttgatccattttgagttaaattttgtatataatgttatgtaagagtccagcttcacacttttggatgtgaatatctagttttcccagcattatttgttgaaaagagtgtctttttccccattgaatagtcttggcactcttgttgaaaattatttgacaatagatgcaagggtttatttttgggctctctcgactattctgttagactatatgtttgtttttttatgtcaggaccaccctaattttagtactgtagctttatagtaaaatttgaaaccaggaagtatatgtcttgtgtatttatttacttattttttgaaatagcatctggctctgttgcccaggctggagtgcagtggcacaatcttagctcactgcaacctccacatctgaggttcaagcaatcctcccacctcagcctcctgagtagctgggattgtagacacataccaccatgctcagctagtttttgtatttcttgtagagacagggttttgccatattgcccaggtgggtctcgaactcctgagcccaagcagtctgccctcctcagtgtcccaaagtgttgcgattacaggtatgagccaccgtgcatggccccaacttcttatatttcaagatggttttggcccttcagggccctttgtgagttttaggatggattttttttttaacttttaagtttaggggtgcatgtgcaggtttattacataggtaaatttgtgtcaaggtgttctgttgtatagattatttcatcacccaggtattaagcctagtacccattagttatttttcctgagctcgcctcctcccacctggatttttttttttatttctaccagaaacattgttgggattttggtagggattgtattagtctgtagattgcattgaatagtactgacatcttaacaatattaagtctttaaagccatgaacaccagatgtctttccatttatttacgtattctttcttttctttcagcaatgttttgtaattttcagtgtacaagtattttacctccttggttaagttaattcctaagtattttattcattctgatgatcttataaatctgttttcttaatttcctttcctaattgttcattcttagggtatagaaacacaactgattcttcgcacattaaatttgtgccctgcttcttcgcgggtttgtttattctttttttgtgtttgaaatccttgaggttttctgcatataagattatatcatctgcaaatgagataattttacttgttcctttccaatttgagatgatttttattcattttcttaatgctctctcatacattcaatactatgttgaatggaagtggtgaaagcaggcatcctgtcttgtttctgaccttataggaaaagctttcaattctttgccattgactatcatgttagctatgggattttttttttccccccagatagagtctcgctgtgtcgcccaggctggagtgcagtggtgcgatctcggttcactgcaccctcctcctcccgccaggttcaagtgattctcctgcttcagcctcccaagtagctgggattacaggtgtccaccactatgcccagctaattttcgtatttttagtagaaacatggtttcaccatgttggccaagctggtctcgaactcttggcctcaagtgattcacctgcctcggcctcccatagtgctgggattatagtcagccaccatgcctggccactgtgggatttttatatatggccttcattatgttgtggtaatttctttttattcttagtttattgagtgtttttatcataaaatcttgttgaattttttcaaatattttttctgtgctagttgagatgaccatgtgatttgttttcttctttctattaacatgatatattgtttttcatatattgagccatttttgcatcccaggaataaattttacttggtcttcgtgtataatccatttaataagctgtggaattcagtttgttggttctgtgttgaggactttatatcaatgttcctaagggctactggtctatagttttcttttgtagtttctttgactttgctatcagggcaatgctggcctcattgaatgtgttaggaagtgtttcctcatccatttttggcaaaactttgggaaaaaacgatgttctttaaatgtttgatagaattcacagataaaaaaatcacatctagggcttttgtctggaatttttttattgttattattgattcagtcttgttactagttataggtctattcagattttctttttgtgtgtgtgattcagtattagtacattttgtacttctcgttatttctccatttaatctatattatctaatttgttggcatacaattgttcatagtactgtcttctcttttttttaaacttctgtgcagttgatactaatgtccctacttttatttcagattttagtaatttgaatcttctttatcttaatacaggtaaagctgggtcaattgttaaaattttttcaaagaaccagtttttggtttcattgatttttctctgttatttttctattatttatatcctctctaagctttgttatttccttcatcctgctagctttgggtttattagtttgttctttttctagttccttaagatttgaagttggattattgatttgagatcgttttcaattaaatgtgtacaactacaaatttccctcttaggactgcttttgctgttctgtaatttttggcatgttgtgtttttttgttttaatttatttctaagtattttctaagttcccttgtgatttcttctgcgtttaaccgtgtattttttaatttccacagttggtgaattttctactttttcttcagttattgattttattgattttcagtggcatcctgttgtgatagaagatactttatttggttccctgttttttttttaaaacagagtgttgctctgtcacccaggctggagtgcagtggtgcgatcttggctcactgcaacatccacctcctgggttcgagcaattctcctggtctcagcctccccagtaggtaggattacaggcacatgccaccatgcccagctaatttttgtatttttagtagagacagggtttcgccatgttggccaggatgatctcgaactcctgacttcaagtgatccacccgccttggcctcccgaagtgctaggattataggcgttagccaccttgtctggcccagatcctctattttcttgcctatattctgactgggtgtttttgtccattattgagagtagggtatcgaagtgtccagctgttatttcagaactgtctgtttaccttcaattctgtcaattttttgcttcatataattgggtggtctcttattaggcatgtaaatgtttttgattattatatcttcttgctatattgacacttattgatgtgtaatatcttttttgtctcaaccttgttttgatttagtttgtctaatattaatgtagctacctgcactctcatttggttattacttgtatagaatgtctttttacatcccttatttgtgtctttggatctgaaatgagtctcttgtagacagcatatacaatctcttgtagattgtgtttttcttatacattctgtcaaactctgccttttgattgaagagttttatcatttacaattaaagtaattattgataaggatttaactgctgccattttgctgtttattttctatatgccttacagcttttttgtccctcatttcctgccttactggcacttgtgtttagttgatattttgtggtgaagtgttttaatttccttgttatttccttttgtttatattctgctattttctgtgtgtgtgtgtgtgtggttgccattgggggtcacatttaatgccctaaagttataacactgcaatttcaatttataccaatttactttcaatagcatacaaaaattcagctcataagattcagtccctgctcccttccagttattgatgtcataaaattacatttttatgtattgtgtgtctaaaagcgtagactaataattgttttttaatgcagtagtgtcttaatttgtggaaaacaaaaagtggagttgtaaaccaatgttacaataatgctagctttggtaattgctcatgtatttatcatttctcagatctttatttcttaatacagcttcaagttactgtctagtctccttttatttcagcctgaaagactcacttcagcgtttcttgcaggacaggtctggtgataatgaactctctcagattttgttaatctggaaatgtcttaatgtcttcatttttaaggacatttttgctggatatagtattctcagttgacaggtatttgtgtttatttgtttgtttcctttcaggattttaaatatatcatcccactgccttctgtccttcaagagttctgatgagaaatctgctgatattgaggatccctttgtatgttacaagttgcttctctcattccatgttcaggattctcttttttcatagtttgattataatctatctcagtttttcctacttggatctctgagtttttcctacttggagttaattgagcttcttgaatatttatattcatgtctcatcaaatttgggaagtttttgattaatatttcttcacataatcttttttgccccttttctctctttttattctgggattcccagagtgtgtatgtgttggtccacttgatgatggtgttccacaggtgtcttaggctcttgtcttcaattttccttcagttttttttttctgttcctcagacacgtggtattttcagttgttctgccttccaagtttactgattcttctgcctgcccaaattggcttttgaattcctctagtaaatttttatttcagtttttgtacttttcagctccagcatttattttttgatttttttatgttttctctttattgatatttcaattttgttttttgacattatccatatcttcctttagctttttgagcacctttcaacatttgttttaaagtctatgtctagtaagtgtctgccatctgatcttctcaggcacagtttctgttaatttatttttttccttttggcctatacttaatgttttgcttggggtagtttttttttttggtatgctttgtgatttttgttgttgttgtcaaaaactggaatttgaatcttaaagagtggtaactttggaaattagatttttctcttttctctaagatgtgctattttgtttggtttttttatttgttgtagagtatttctatgctgggtgtaatcttaagatcttctcggcctgtgtttttccctgggcatgtgtagtgactttctaaattgccctatgtatgcagttcttttgcagtagtatcctccttaaatgtttggctcctaaaaggcaaaataaataaataaataaataaaaattaaaaattaaaaataaatcaaaggggtgaaatagctctggatctttaaatccctggagcaattttttcagccaatggcagttaaataatgatagtctgcctctgtgtcacattttgatcagaagcagcaattagcaatcagaacacagattcctgatatttggagggcaaggtctttgttgccaaccttgactcttacaaactgtgtgcagggtgctctgggaacatgtgcatggttgcctgctttgagagtgggtgatgggtagccgcgacggcacaaagagctgaaattgactcaaactaactgatttaccattcaagtctttccttagaaactgaaaacctgaatagactccagagttccagaatcacagattctgcttacagtcgtctaggtggggagatgggttcctggtacttctgattctgccatctttctttgactaattttttttttttgttcttgagatggagtcttactctgttgcccgcccaggctggagtacagtagcatgacctcggctcactgcaacctctgcctcccgggttcaggcaattctcctgcctcagcttcccaagtagctggaattacaggcgtgcaccaccatgcctggctaattttttgtatttttagtagagacagggtttcaccatgttggccaggctagtctcgaactcctgacctcaggtgatcaacccgcctcagcctcccaaagtgctaggattacaggtgtgagccactgcacccagctcttagacaaattttttattccaaactttttttattttatcatttgaaaggtatatgtttattattttgtcaaaaataattttaaaacgtattcttgaagcttatttagatctgtttcataggaactgtgaagaaagtaaagaatttaaaaaatgaagacagattttctcaccctgcttatgggtgcttctcgtgctagccttttgcaagtgtcgggaagtgtaacctgcaggaggcatcagggctttgggcctgcatggtctgagtgctgccctgtgagtttcagaaggcgcagcaacctgtatacctgaaagccatctctgctggggcaggtacctagtgtccccgcctacctgggtcgtagtcaggccctgggcaagcctgctatgcttttccttccctaatccctcaggggtgggatagagagcacagtggcctcccagggaggtagaagctgctccagactaacaatcagagctgccagttcttaatccccaagaccgccagacttcacaaagacataccgaggtctgtgctgtcagtgccccactactacactcccttaagtagccccacattcttgtgcttgtttcttttttctgctctctttccttgcccaggtaagaggtctgcccataaggcatattttgcagcatgtgaagctttttaaaaagttaggcttattgaagtataatttacacacaaagtacaaaaaaaaaaagactgtgttctcaaatctgtgagtcattaatgggtttagatgtttatatattgaaattattggaagtaaggtatgtttatattagaaagatttgtagtctagattatccaagttttgggagtattacctctctgcttttgtttatctacttttttagtctctactttccaagtatctataggcaaattttcccatttccctttggaaagtgctgttttcttgctttttttccgcctttccattgtgtcagacttataaggcaatcagccaactgtgggcatgaaatccttgggaggaaagagaaggaagtgggaggggcagccatggtgaatgtttccctaagttatagtcaagttctttgagagaacataacctcatcccctttttaaactgttgtaatactttcttttaaatagattgtttattctcctgcaagtctcacagttgttcacagtggtaggtaagaaatcataaagttcaaatattaaagggagctcacaaaagagcatggtttcaccagccctcactaaaaacaaaattatgggaaaatgctgtaaaagaaaccagaattcttggttgcaaatgatagaaagtgactctgatttacctaatcagaaaggaatttttaaaaaagtattaggtaggtcatagtttgacaacaagacttggaagataggtggaagctaagggaagcaagacatggccccaaggtttcaacaggagcaatctgcttaggactttgctgcttggacacttggtgtaatagctgctgccactatgcctcgaaactggtgactctgctcattaactcacctcctctggtgatctctaggaataatctctgactctcctgtaccttgtcctcactaggattcggtatccacggcaaaaagatctattaatagttggtatcaggcctgtacatgtgttaagagaaagatgaggaaagaagtatctgcttctaatctcttgaaattatctccaaattgaaatggtattttggttgcctaacagcctgaagatgacaaatatcccctacaaatttctcctattttaccctcttcctaactatatctgtaatttaaagtttcacatattcttttgaaaattgttttcattgtttacccactttttaagaaaagcaaatgggaacatactaccactgtttggcccctttcaaaaattttatatctgaggaatcttccatattgttgtggacatctacctacctgattcttttattaactaccttttatttcattttatgatcatgctatcattaataggcccctatgatgaatatataagttgtttccagttttttttttgtcattgagaacagttcacatatgtatcttgttgtcttttccaagtatatctttaaggcaaattcttagcagtggagttgctaggtccattgcgtctatggtttaaactagtgccttcaaaaatggtattttatatactcactgtttaagagtgcttcttccttctatccccactaactttggcaaactgaatagtttcaaactttaactttttatagcttgttggcaaaaaatggtatcttgttatttgatcgtgtttttttaattgtgaggtttagcgactttttgatgtattggtcttatgtactttctggtgtgtgtgtatgtatatactgaccctattttcaacttatttttcttttagtttgtttgtattttccttaatgattttcaggaaaccaattttattctttcttcagacagttgtctaatgttctgcttctcttgccatttgaattttgtgactacaaaattcagatgaaacaataatagcataaagaacttggtgggttatcttttgttttgcattattgattgtttattaagaaatattctttaaaagtcaccttgcttaaattagcaagtaggaaatgctttcaataaagagaactgtcatgtacccactactccttacttactgaatcatcttcttttggatagagaagataaaagtgaaaagggaatttaagagttcctgcctttttccttgtctttagcattatatagctgtttaatgtgtgggagtctaatttcttttttctttcttgagacaaagtctcactctgttgcccaggctggagtgcagtggcacagtcttggctcactgcaacctctgcctcccaggttcaagcaattctcctgccttagcctcctgagtagctgggactacaggcatgtgccaccatgcccggctaatttttgtatttttagtagatatgggacttcaccatgttggccaggctggtcttgaactcctgacctctagtgatctgcctgctttggcctcccaaagtgctgggattacaggcatgagccactgcacctggcctaatttttttattgttctttttggtgtgaacattctcccctcctccaagccttttgtttttactattttcatgttcctttatatgtgctgctgttttgtttcatctgtaattatctctcatccccttttttggctattataatatatatatgtacgttttgaatctgagctttgaaggtaaattcactgcagctgtgttggttgattttagataatttgtgtatttcctcctttgtcttttttaaactggggtcatttgtagttgtttatacagaattttagtttttaaaaccacaagtctttcattataggttgagttatgaattcatagcctgttatttaaatgaagcttttgaaatctgttttactgatctgtatcatatctaactacgccagtatttccttccttgtctgacgtgaactctaaaattatgtgaacactttctccctgtttcctggcatttccactcaaacttgttcctcattcttagttagaaatatatccagaattgtagtttctttctaatctaatgacagaagcaaattaatcaagcatggcaagaatttattggaaaactgcatgtagttgaaaatatgtttagtatatattttgacagctgtgaagtctctaatttttactgtaccttttctctgttccaattttatgctctattctaaggatgtacccatttctactacctgactagggagcatgtgtattgtatcccagcagattttttttttcatagatagatatcctttagatatctgttatccagtgtaggtagccactagccacatgtagctatcattatgtttaaatgtaaataaaataaaataaatttactgagttgtttttgctagctacatttcttgtgctcagtagctacatgtggcttgtgattactgtattaagacagcacagatacagaacattttcattattgcaaaagttctgttagacagtgctgttctatacagtgtcattctgcctctcattctaaaaagttctaattcctgaagttgatgtactctttctgttgctgtcctctagcttaatcaaaataaatttgagtctttttaaaggtaggttgcattttacatactgatatttctaaatcagaggctatttatattactttttttatattacttttaaaaattagctttattggagtataatttacatgcaataaaatctacccattttaaatgtacggttcattgacttttgagaaatacacacacacacacacacacacacacaccttcttgtaaacacacaccttcttgtaaacacaacaaccaagatttagaacactcgctttatgaaaagtttccctcatgcccatttgtagtcagtccccaaacctggtttcaggcaatctctgatctgctttctatatgctttgcctatactaggattacatataaatacagtcatatagcatgtattcctttttgtgtctggcttctttcttttagtataatatttttgaaatttatccctgttgttactagtatcaataatttgttcttttttattgctgactaatattacattgtatggatatgacatttctttattagtgtggtgggcatttgagttgttttcagtttgggtctgttatgaacaaagctgctgtaagcattcatgtgcaagacttttgtggacatatatttttgtttctgtttattcaatacctttgagtagaattgttgggtcacatgatgtagatcagttgaacagagtagattccagaaaagttcacatacacatttcttgacaaaggtgctgagattattcatgggaaaaggataatcttttaaacaaataatactggaacaatagagaaaacaaagtgaaccttgacttttatgtcttatcatatacaaaaattaatttgaagtggattgttgacctaaatgtaaaagtaaaatttaaaaatataaaacttctagatgaaaacataggagaaaatctctgtgacttttggtttaaagatttcttagacatacatataaaattaactatataaggaaaaaatggacaaatttgactttatcaacattaaaaatttctgctcattgaaagactcaaaatgaaaaggcaagcagttttggagaaaatatttgcaatacatatatctgaaaaaggacttgaatgtataatatatacataaagatgctcttacaacttcataatgagaaaataaccccataaagagaagggcaggccgggtgcagtggctcatgcctataatgccagcacttttggaggctgaggtgggtgaattgcttgagcccaggagtttgagaccagcctgggcaacatggtgaaacccagtctctacaaaataaaaaaatacaagaaattagctgggcatgatggcatgcacctgtagtcctagctgtttgggaggctgaggtgggaggatagcttgagcctgggaggcggaggctgcagtgagctgtgatcgcaccgctgcacgcttgcctgagcaacacagtgagatcctgtctcaaaacaaacaaacaaaaaaaaaaacaaaaaatggaaacagaaattttacaaaagaagatatatagatggccagtaggcatatgaaaagatgtttaaaatcagtcatcagggaaatgaaaatttaaacgtaatgagatagctcatatttactggaatggctcaaaaagggcttacaggaattggcaaagacatagattaactggaactcttatgcatgttggttagagcacaaaatgatatgatttcttgggagaaatatttggcagtttttaagattatttttgatagccttctgaatttcttagtgagttataggtcagttctgccactgtttctttcttttctttctttctttctttccttccttcccttccttcccttccttgcctgtcttgcctgccttccttgccttgcctgccttgccttcctttcttcctttcttccctttcttttctttcttttctttttttttttaaaggagtctcgttttgttgcccaggctggagtgcagtggcacgatcttggctcactgcaacctccacctcccgggttcaagcaattctccctgcctcagcttccccaatagctgggattacaggcgcgttccaccatacttggctaatttttttaattttggcagaggcagggtttcactgtgttggccaggctagtctcgaacacctgacctcaagtgatctgcccgccttggcctcccagagtactgggattacaggtgtgagccactgcgcctggcctggcactgtttatttcttttccctccagttttatacctatttagagagattagattttcttgagtactaggaatcactatttttgagcagaattattcaaaactgttattattttttctttaacttgaggcaatgtaggagaaagcagtactgtgcaggtgaaagttacaaacaagaacattttaaacaagatagttactttccatgtattggatacgtaacagaattaattctaataaccatcctgaagatggtcaggaggcattagttaagaattgaaatgtttggagcttgcctgtgttgatgggattaaggcagggatgatttatgtgtaaatttatgcgttagtaacagcagtaaccgctgtagttacactagggttctaagagcaaatgttgattaaacatgaatgtagcaggagtgataaggtttggctctgtgtccccacccaaatctcatgtggagttgtgatcctcagtgttggaggaggggcttggtaggaggtgattggatcatgggagtggtttgtaatggttttagcactatcaccctagagctgtctcgcgaaagagttctcctgagatctgcttgtatataagtgtgtagcacctcccctctttgctctctctcttcctcctactcctgccgcggggacgtgcttgctttcccttggccttctgccatgattgtaagtttcctgaggcctctgattaaacctttcttcttctaaaagattacccagtctcaggtagttctttatagcagtgtgagaatggactaatacaaggggaaatatatatggttaccaaatagcgaattagccatgggaaaaagtagcaaataaataattattttactttttcagatgctaatttttcttttcgtttattttaggattggtgggagctgtccaatgtccttaggctgttttccaaatgagataccaaaagctagttctccatcgggtttctcaggctgctagaagcattcattattatggttgtcattacttcgagttctgttgccgctatgcccacagtagtatttgttacataacaggtgcttgataaatatttgctaaatgaatttttggaaaatacaatctgccacacctttcttctacagtttacaatcttctgttgagatcatccgatagattttttttcttagatattgtacttttgaggcctcaaattgctgtcttttgtattttctatgtctgcagagactttccatctttcactcattgtattcattgttttttaacatctttgtacatatttatagtaactgttttaaagtcactgtctgttaattcaaacatctggttcatcttggagtctgattctattgcctgctcttttttctttgtaataggtcatgtttttctgctttgcctgtctagtaaattttaatcgtatgttgaaatgtagggagtttggattgttacttcctttaagggtgctgagtttcattttgtcaggcatttaaattgatagttgatttagtattgtcaggtttggttctctttgttaaagcaggcatttttcagatttgtcttttgtcctagggcatggtttttaacttcaaggttgccctttccaatgtctcagctaagtatctggggtgttccatgaggtctcttccactttgcctaggccagaactccagcttctcccagtattatatttcgttacctctggcgtcatctccgttatgctttcagatcctgcgcatagacagcccagcccccagccaaggacctgagatgaaatccatacaaaattcttagtcccttgctccacaaactccaacagccttagcagtctaatctcttcctgtttacctcagtgaaatctgtgttccacttgagttccatttccttctgtatcagagaagagccaccatgctgaaagcaaggggcactatgtttctttgttcttaaggatggtagcctatctgcaacaactgtagtgtgatataaaaatatataatttatgttgctgacagttacaaatactgcttgcagtactttgtaacataatttttcagattcaagttcatatactctttttttccacatcaccacacacatattttcagacttcctcctcatccttcttcttgccagtagttgtattataattcctgccagtagttacattataattttggttatatcaatattgagtttttatgggattataactagataaatgccattcatagttaagtgatagagtatattgtgacttttttcctgcatgttttattttttctggacttcacagttgtctctcttttttttaaaaaaattagttttcaatgttcttagctttaattcataaactcacccctaattgtataaatctctcaacatgtttaagcacatttggcattatatcaattttatcttttccaggtgccttctaatctgtcccagtctggactaattgttcttcctggcttgctgtatggctgtctactcaagatgtcccttcaccatcattctagggattcccttttcctctcttgtgggttagattcttcagttcttggagactgtcatcttctttcatggtttcccactcttgttttggcggagcacatctttagtaacttcctgacaaagtgtatggtttgagatttcgctgattttaaaatgcccttattatatagtcacacttgatttatagtctgtcttggtatagaattctaggctgagaagagttttccctcaaaatcagaaggttttgcccaattgttttttagctgctagtattgctgttaaaaaggataatgtcattttgattctagattcttttatgaaacctgtttcttctctggcagcttttaggatcttctgtttctttggtattcagaaatttaatgagatatgtgtgcttctattttggtcttattttcatctgttttgccaggtactcatgcaactttccagtttgaaaactcacatccttcacttttgagtatttttcttgagttatgtcttcggtttcttctcagtgttctctgtttctggaactcctaaaatatatttaacatcctgaactcttagtttttgtttagtcttctgattttcatttgtctttttattctgtatattctgttaattcctcggcttcatggtcttctagcccttcttttgcctatcttatggggttgaggattaaacagtttatatacctgaggtgcttaggatatgtctgtcatatagtaagtgcttgtgttagctgtaattgttgtttactttcataactgtcttgagggaaaggtctttggtcttgattctttgacttcttggctgtacatgaccttggacgagttatgtaatctctttgagacctacctccctcttctgtatagtgttaataagctctagctctcagatgtttgtgagggtcgaatggagtatatatgtgaaaatgtttaatacctttgtacagaattaatagttagtacgtggatctttcaaatatcaaaagttttcagtttgatgggaaaatgatgtctgaattttcagggttatttttaagagtacttgattatgactgtcttgtaaatctctatgagctaggtatacttgcactaaatgctaatgctttttaaagaagttatgtcttaatattcagtctcattatgttaggttgaagatagaagattatgaaaatattctctgaaaagctctggttttacttcagattgtataaatctgtgtaatgtaataattatttaagaatgacatgattactactctaaacccatagaaggggtatttgttggattatttattttcacttaaatggtatttgagattaggaaaaagaaaatctgtcttttggtttttcttgatagtattaatgtaatttcaaatgttagctcatttttgttaatggtggctttttgtttgtttgttttgttttaaggtttttggattcaaagcataaaaaccattacaagatatacaatctgtaagtatgttttcttatttgtatgcttgcaaatatcttctaaaacaactattaagtgaaagttatctgcttgttagagtgaggtagagttaaagatacattttaacagaattgtattcctaaaccgattaagtcaagaagtccaagagcattgttagatcatttagaaagtgtagtgatgaggtaaaacattgttggcacagattcatgttacttgatctgctttaaatgacttggcatctagcccatatttgagcccataaccgtgtggtaatttgaagtgtaattcacagtagagcttctgttaaagcactaatagcatcttccatggaggtatacttcagagtgaatataattttgtttatcctgtgtctctagagctattgactgaaaaagctgttagggcattctctaactgtacatcacctaagttatttaaaattgctgaattaggtggcttgtcttgtctaggacagagttttaaggactgcccacctgattgatagagctagttgaccttatctttaactttttgtttttcttttgactttgggagtagagatgtgaaaaggtaaaaaggaaggaaggaagagaaaacttaactctttttgcccatgaagactgtttttccttctcaaaatattgactattttctgatttgtaaaaatcggcacataaaacgtgttattttttacttgacttttatctttcccatgtgatatctataaattatagataggaaaaatttatctgtaatttagtgatctttctagtgtgataaaacgtcagaagtactgagagtggagtggacattgatattgttactctcagtaagttttcactgatttttctcagagtcatgaaggaacaaacgtttgttaagtccttatcacttattagataacacaaaacatgttgggggggtgtgtacagaggtgagtaagatgtagctcccattctcaagtcgcttacattctaatgtaaaaggtagacaaagcattacagaagaagtaactctgctatagaaggttgcaatgaagagaacattggaaacactaattttaccttataaagaaggtttcataaaggaaggcaagtttgagctggggtgaaaaggaccagtaagggttgactttcaagccaaggagaggaggggaagtgatgttacaggccaaaggaatggcattgtaagaagcttgttggcataaaagtgtttagaatatggcagcgaattcattatcatcagattgtggtgtctgtatgttgggggtgggagagaattgtggtggcaataggcaacaagataaaagaaagtaaaaggtgttatggaaacttaatgggtccagcttacaaatgatctatgcatttaggggtctttctcttttcctgataaacctctcctacaaagagccttgttgcggataccatagtgtttctttggaggaaaataaaaactacaaagctttgtattttttgcacaactggattcagaatataagtaataaaaaaggacaagaactttcaaaagctagaagccattaaactgagtcacttcagggttagactatcagaactggggatttagaaagtctcagaatggaaatcgaaggacaccaaagacaaattcggcctttttcaaaattttattctagtttaacatattcaaagaaagggaaggaaattcttttcattcctgtgtgtagtgacttcctgctttaagaacttaggacttcagctgtactatcagtattgtaggtcacttaacattattatggttaaagttggcattggagagagcctaggaacctaactgcctgtttgtttttatatttccaaccattggattcccaagttaatgaagtctgtttattagttgagggtagctcttaatgcatatattttaatgccccttccccacatggaatcataagctttcagaactggagagtacctgaaagagatcatttagtccaaccttctcattttacagatggggaatctgaggcctagagaagttaagtgagttgaacaaggtcacacaggtacatatggtagccgaccatccactgtttatgccaatattccctttacgttttgcttttttgcttgttcgttttaacctctccaaattttactgacttcagaagtttctagaactaagttatagcatgttttgagttctaatgtcactttccgatcttctttaccttttttctacctctgtttgtatttctggttctggttaagtgagtctggtaagcagcaggtgttctattttatttcttttatttttaggatagtattacatgtgatatatatgtctttgcaaacatacataatttgaagatcttaaaatatttgcactaggcatacccacatttaatagtatgttaaatcttttatagcaattatgatatacatgggtgaagaagagttcctaatatggcctttctgattaactgtatctgtttatatctgtgttttcttcaggcattcataacattaagcaaattcaggtgtactgttacttaattgaattaatcagtttgttttgtacaagtatattttatttttgttccttgttgtataatctggtaggaatggggaaggggagatagtgaataaagagatgtatacttcttgcctttgaggaatttaagttttcactgtataccaattttttaaaggtatttactatatttcagtgcatattttatttgacatactttatcattttgtggtaaacctttagctttactaattttcatctattaagttttcttttgtaagatggtgatagcttcatcaaagagagtaaagaagagacctgcctacctagctgattctatggcaaatctcacttctctggaagcttttcctgttaatcttattccttcagtttctgcctcttgtttcataaaaactcattctttaaatgcttattcatttctcttgtctcatataaaccaatatgaggtactggtatcttttgagttttagttataaggaagcataaatggttaaatttaaatggctaaaccccatttgccatttgtgtatctttaattttagtttgttgagagacttatcactaccaaaccacaaagaatttaaaagaaactgtcagtaggtataggtggaaggagggcatttatcagagattttaatttaagaagaaagtcttcatccttatcctaccaacccccattccctgagcatatttatcattactagtcccagcatatttgctcccatatttcctatgcttacctgtgaagattttcataactttttccttgctttttactgtcactgttggttctgtgatttatgacagatactgctcttgtaggaatgctggctttgactgaaatttgttactgcttttgtatttaaaactttttttttattataagtagaattatggaacagtagtagaaaaagtttgacttttgtaatcagagatactgagcttgagttctggctctttcatttgtatactgttatttggggcaagttttttaatgctcttaagtcttagctttctcatatataaaatggagataataacagttatcacgtgattgtgaggatgaaacaaaaaaaagtggaaactctttgtaaggtgtgttcatctggttgacacttagtagtcattacttccactttccgtccatatagtcctcttaacagtaatatttgagaggcatttttattaaagcagtcttaaggagtgttcgtcaaaccacatgttctgggatcctgagaaagtaggggaagtttagagaactgaagctgcacaaaactaatgtttattttctgttgtgttgtcctgagaccagcttcttagattgtgtttcctagtcctacatctctgattccttataaaatattccattatgaattcttcactattgacaatttctccccttttatcttaaaagtaccaaagaaagtgtaaaatgtgactgtcttgtcagtcctctttttcctgtttttcatgtcaatgggtatgaaattactagcaaggatgcatatatgtgcatatgtcattactaaatgcattttctttctagaaaaactcaatatactaaattgtactaaaaaggaaaagcttgttttgttttgagtggtagtatgaaagttgttttattttaggtctgaccagttagaaaccaatggattgtagtttatttataattagttaaaccttcatgtgaatttggttttgaattacctttaaggtagagaagaaactatatagatgtttttcagggtttctaaatgtacaatacaggttcacaatcacttatttgaaactcttggggccaagtatgtttccattttcagaaattttagttttcaaaaggtagcacagataaatatacttttacataaacaccccagtggggtgtgggtcagtacctgaaatgaaatgttttactcttcgctctaagtgtattaaatattatgtacaatcttattacttcagatcaggatttgctgtagttgagtttgccataaaacttaagagaaaattttagatgttttgaacttttgggatattgaaattgcaggttaaggagctatggacctttatttgttttaaaatgctaagagtttattttaagtaatttttaaaaaatttgttttgcatagtagttggagttaccagggtactgctaaccacactgatatgtaagatctctttctgagccttttattgtttgtaaacatggcctgttaatcattagaaagccagtacatactaacatatcactgctattaagacaaatattagcatactctagtaatgacaagtcagcattttactattctgtattgattttacttattctttcattactctcatactgtaattaaaacttgcaatctgagagactgttgaaaaaggtgatcgttggcttttcaacagggagtaaggtctggtttaaaaaaaaattagtaagcatttggccaagtagattaacaacattcagtttttctttactgtccttatgcttttactatttttaacatatatctttttgaagaatagtttgagaattatgtatgcttaactatgagatacagatactattgaaactagtcagttgtttataggtacttgtaaaattaaaaatatattccaatagcatgcagatttttcatagaggaaatttgaaagcatggaagcacctgaatttacagtactctgtattagtggcatcacaagtttttaagcaaatgtattagctctaattgcatacacttaatcttttaagctttggttttattattataatatgggggtgataacagtatctacttaatagaattcttgttattacatgaaataattaatgttaaacacagcataatatgtgtcacattataaagattcaggcaatgtttgttagtattagtacttttttttcttcctaagtgcaaaagataactttatatcacttttaaacttttcttttagttgtgctgaaagacattatgacaccgccaaatttaattgcagaggtaggtatgaatgtactgtactatgttgtataacttaaacccgatagactgtatcttactgtcataacaataatgagtcatccagattatcgagtgagatacatatttatcttaagaattatctttaaaaatttcaaaaattttaattttactgttgtgttttaggaaaaagtattgcataaagctattaatattgtcaggaagactaaagtgcagcatagactaagaattaggaaaattcctagactaaaaatagtataaggagagggtttacctactatttgaggcagttggtctaatagtaagcaatcacagggagaaagcagaactacttaactcttctgtgttgaggaatgacataaaaggtaggaaaggatataacaaatgttgataagaggagtctgatggatgagaggagggaactgctttaaatgagtttctacttcagacataagttaattctcagagcccacaaaaactttcacttttatttgtgaaatacaactcagttctcatggcttaacactttaaaccatgagaaaactgaagagttgagaagcttggcagatgctgctgtgatagtcaaaaagaaagtgggtgccatgagctactattgatgtatttgccattgatccctcctgaaaatctagaatggactttcagacaaatggtttgaaaattctaaatcactaatgattgagatttagtataggtttactaagaacgggttttttttgtttttgtttttggtggatttaggctgttgcttactaagcaaagcaggctttagttgaggtttatcttgctttaaacagatatttaacagattttcctggaggtttttgtgtaccactgggaaaatgaagttaggcagatgactaagtgaaagctgtcctgctgactccttataatgatagtcattgtctaccagaagatctctcctgtcacaccaaaggataattgattatatcctgtaccatattatgagtcacctgattggagatataagacatacttctcacatatttagatgacacaggttagtacattgaatatcagccagggtttttaaggatcttaatagagtggaactaaggtagaaactattaagagcaattaatagtgatatatctatagtcctgtttctaaacaagtttttttaaaaacctcaactctgactatagtgaacagagaagtcttggactcttacaattcatgtgagaagacctgaaactttgataacaattatatacattttgtgagtaatttctttggtgtatgccttcacatatctctggtatgtgacctatgctgcagtccattgagcatagattcccagaatgtattctcctgcagaaaatggaggaaaataatacttggcttccctaatgattacatgtgtatacaacactaacatttgcaagaccacctttaaataacacacttagcatttttattttatgaaatgtaatatgtagttctttgcatagtttatcctattagtaatctattctgtctttggaatatgttttgtgatgatgaaataaatactataaatagtattattccttttgcattgagagtcctgacgaaatgtccatgtgacagttcattttgggtttagctctacctctaatatgtgacctatgctaccagtccgtatagcgtaaattcccagaatatatcctcctgaataaaatgggggaaaataatacctggcttccttaatgattatatttaagacttatcaagagactattttctatttaacaattagaaagttaagcaatacattatttttctctggaatccagtgtttcttttaaatacctgttaagtttgtatgcaacatttctaaagttacctacttgttaattaaaaattcaagagtttttttttcttattctgaggttatctttttaccacagttgcacaatatccttttgaagaccataacccaccacagctagaacttatcaaacccttttgtgaagatcttgaccaatggctaagtgaagatgacaatcatgttgcagcaattcactgtaaagctggaaagggacgaactggtgtaatgatatgtgcatatttattacatcggggcaaatttttaaaggcacaagaggccctagatttctatggggaagtaaggaccagagacaaaaaggtaagttattttttgatgtttttcctttcctcttcctggatctgagaatttattggaaaacagattttgggtttctttttttccttcagttttattgaggtgtaattgacaagtaaaaattatatataaatacaatgtataatatgatgttttgatgtatgtgtatatacattgtgaaatgattactacagtcaaactacttaacatattcatcacctcacataattattattctccccccagggtgaaagcatttaagatctacaagctacaattttcaattatacaatgttattattaactatagtcactatgctgtccagtagagcttcagatcttgttcatcttgtgttcctccctccccaccctcagtccctggaaaacaggttttaaagatagttgctaatccttatttcttctaaatttttaaatcagttgctgcctcaatttctatatgagaaatgactgattgatttcatttttctgttcacgctaccattttcatatcatactagcacatgttacccattaactgtattgcagatttggtctcacaaaattcttctaaaataacatttttaaaaagcatattaatcaaaaataagctttatatttctgaagcttgtttgagcatagaatgcctttggataaaataccattacctagtaaagtgtgaacttttataatccataaaaattattcttttataagaatattcataaatgtagttagattaatagaagattctcgattctttgatcagaaaactaaggactatattgaaaaatcagtgacaaatttaattcttatagtacatctgaaagaaaaaagaaaactcttgggagaacttttacagtgatttaattttgctgttgatatatttctttgggtggtaagtatggcaaaacatgttaaaatttaatgcaaagagattttgtacatttttccatctctaagaaggacaaagcctaagcccctccagatagatagaaaaactcatttagagagttctccttcatgttaatctaatttcttcttaattcagctgtaaaacagaaatagaatgatcgtattaatcatttaaagctgtgtaattgcatagattccttgttcctttaccccctcttatatcttgtttcctatcctttgtgactttttttgcattatatataaggatgccgaaatactgtttattgttgatagtttacaaaattgaatcttacattagtgcataattttggtgaatgttgaagattatggtagattgccttacatttctgcatattgtttgcaccttggaatgatagcactggcatgaattatagagctgaggatctaaagatttttactttgatttatcccattatcatctgcagggaaacaattgcttttactgattaaaaatgcaggctgggcacagcggctcacgcctgtaatcccagtactttgggaggccgaggcgggcggatcacaaggtcaagagatcgagaccatcctggccaaccaacatggtgaaacctcatctctactaaaaatacaaaaattagctgggtgtggtggcgcgtgcctgtaatcccagctactcaggatgctgaggcaggagaatcgcttgaacccgggaggtggaggttgcagtgagccgagactgtgccactgcactccagcctggtgatagagggagactccatctcaaaaaaaaaaaaaaatgcagtagcaaaagcgatggtagaaatttaaaacagagttgatgagcagcatatattttggtagtggaaaaaaaggtaaaaaattttttgtaataaaatagaaaaattttgtaatgtggaggcgcagaacactagatttaagccagggggtcttaaattgtgttacattccttttaaagtctgatggaaggtataaatgttctcccctcaaaaaatgtgcatagtgtacataaaattttgcagtttttattacattgaaatatattcttttagacagaatgtaaaagaaccttcatgaaaactatgtcacttttttatgcaaaaaccagtggctactacatgagagcaatgaataaatctaagtggtacaaattaaccaaaattaagctttagttctgttcaatactaaattttaatgaaaagactgctatttaacttttaaaataacaagttgaaactatgctctttgactttgactttgcaacttttatatgatctttgatatccaatcagtgttgactttggtaaaaagtgctgaaaatgctattttacaaaagaaagaagagtaaatggaatctgtagattctattgcctgatgaaagtagacgtgtcaagaaataagaattctccaaggctcttcagataaattcatgtttcatcattttctttgccttcaagttactgagatcatttttggcaagatctgtatcattaatgctgtgttaggaaagaaaagattatgactccacattttactttcaaggttgaagagttaaactgtttaaaaagagtgtatgttatcctgtaaacagcagtatcaggctgtagaatttgtcttctgaaagcagggaacttatatatagcaaagaacttcatagtgctcccatttcttgacaaaacctctcgagaagctcttgattgaaagtcttggctttcatgaatctggcagctttcacaatagtggatttttcatgacaaatcatcttacacagggaattattcaagggttggcacttgaaacagtagaatactttcacaacaagagataagatttctttcaggattgatgacagtcttgcaccctagcgcatactgatgaagagagcagtgggtgaccatgacatggagagcttctgtctttaccagtgccccaatatcagatgtgttgtctggcagtaaggtgtactgtctgcctacagaatactgaggtttcttcaggagaagttttttggtaaagaaactttaccattttgaaagtgttaatgttttctgaagcttccaaaaagattccaaaatgggaatgtttccttgattgtgtcaccatgcttgcatttgatgaaaacttgtagccggctatactgagaaatcatatctgaagaaaggtggtacttccaatctttttgtgacctactttattattgtttttttaatgtcagggttttttttggaatggagaaaagtatttgatagaggtattgcaacagtcttattcttcttcatgctacaagtatatttgactctttctaagatacttgccttcactgttcaactgtgtgactttttgtttgtttagcattacaatcaatatcctagtaggatgatttaatcaatgatttttaattggaacaaatagtttttgtaatggtctaggcttttccaacttaactgtgctctcacatgtggtctctttttctccctctttcctccttcttatacactctcacccacacacatatgcatacataccctgtctgatgtatctgcttcttcagaatagttggctgtgctctgctgatgatgagaacttgccatttaagaaggacttgggatagtccatgtcatcatgttcagggataaaagtaaaacccaagggcatttaaactttattgtattttattttctgtttccagtccaaattaaatccaagagaaggctccataatcaaaaagtaaggacatattttaaatttgccaatgggaagatattctagtcattacagtctggtaatactatcaattctgtttctcttcagaggtgaggggagactatttgatgaaatcgtaagtcctgtagggtgttgtgaaatagggccagaatgaaagatagcaagaatagtgttatgaaaataaaatgcaaagtttataatatcatgtggtaaaatgtaatagtatttacttcatcagtagaactgctctagtagctgtatattctccatccttgcataggttggaatatcccccaagtgaaaagagattgatgggctaatagttaatagaaaatggagatctgtacatacagtgttaagaatgtagatattaaaattgttatatttagctgttacataatattaagactcagagttaagtaatttcactgaaattgattgctttttgtgtcttggagtcaaaataaataactgaaatctactatacttggctcatgcttaattaatatacttagaccatatttcggatgaattattcacagaatctaaaggagtatcctcgtgttcttaccttctttatccctgtgtttatttaaaaaggcaaaaaaaatggagcagatgctgttggttgaccatattttactgaacagtagcatttgtgtttaggttgaaacagcattagaaaactagatacggattaaagtcagtggtaggtttttttttttttttcttccaggaatgtttcttatagatgatcaaacaggcacaggaaggggaagtgttgtgatcaatattatccagttaatattagcattcagaggaaaatttgagtcctctgatacactgttaaatttctttctatactatcaagtccacaaatcctggaactgcaaaagaattttgagactgttcaaaataattaatctctgtataggctcaggctttcctgcaaggttatgaaatgctgataaaattggtcttattttgaaaggctcctcagcttatacctttccttacaaatgcttccttacaaatgctaaagcatttaatgactcctgacttaaagggaatttggacagattgaggttgttggtcttggaaatataatactgcaggcttctgtaaaatacttgaaatgtaattgttttaaaactttcaaagataccacttgtttgcctgttggttagaatactggtgaaataatttttaatcttttatgaataactaatttcatcataagaaaacttagctaagcatggtaaagctgttgttatacaactgtggaattcttcctgaggagtaactatcttataataaatgtagttgattatctaaagtagttttattcttggaatatctcataataggtttattctcttcttgtcagtatttccttgtagattgagcctgtggatttgcatttttgtaattgtgaatcaccattataggagatacatgcattttatctacttttcagtttgtatggggttaactttattagaattatctttaatgttattttgcttatatccttaattttaattatagacaaacattaagaagctggagaaaattatgttctagtgacatttatatagaagaagaatcttttttccccctttcttttttgaagggagatgaggcagtcatattttggtaaagaatttgtagactttgcagaggtctcttcaaaataatctggctcagagtcttgacatatcctcagcagacatggtgcaaattagatggcagagtggtgggtacaagttgaccataaaataacgcattaggttagtaatgcccaaataatactttgggttttcagtgttgcagagaagtcagacaactgatagttattataaagaaaaatgttctgagagtgaggtaaccgcttaagggaaggaagcctccttctgtcttattcactaatttacaagaagataattgtgttacacttccttaggagtcattcatttgtatatttgacacttttgctttatgaacatgtgaagattattcaaaagtaagctgttggtgatttttttcttccaagaaagcatgccacagggcaacttctagggttggttctcatctagtcctgtgctccacactatctgcatctgcacttaagtttcaatattagataactcacatgtttaaactatgaagaaagagttaaaacatcctgagaatgctagtaagtatgtatttttgaaaggacttccaaaatttgagtttaaagaggtaaactccttttacatgacaaagttacttagaaacactactgctgtttccctctcccttgccttctccctgtcccatgcatacccccagctgtgttccagaatgatggcacataaagtaaacattcatatttatttccctttttttgttttttttttttttttttttgcttgtttgttttgtttttttgtttgagacagtctcactcaatcacccaggctggagtgcagtggcaacatctcagctcactgcaacctctacctcctgagttcaagcgattctcctgcctcagcctcccgagtagctgggattacaggcgcctgcccccacgcctggctaatttttgtatttttagtagagatggggtttcgccatgttggccagactggtcttgaactcttgacctcaagtgatccgcccacctcggcctcccaaagtgctgagattacaggcatgagtcactgtgcctggcctcttattttttctttggttaaacttttagggaaaaagtttgagctgcttttaattttctttttgtttttaaataaattattaaagtttctctatgttaggaactcttgtgtacatgagttcattgagcttattcttaataaagacaaatcttctagaaataatagttgtatctttaaatgatctcaaggaaaatgtttggtttctctggggaatgaattttcatgacctaatcttaaatcaggttattttttctagcctgtttactaaatttctacatgttataacctaatgaaattttcttacttcctctttatttaaaacaaactataattactgtctttttaaaaatcttccaatgtggcgttcttatttttcttaacatttgaattttcctgggccaaaccatgttactatgatacacattatttaaggctgttatataatacagtaaaattgtagaactttcataccttgaaggatcttagcaattatttaattcaaacccattctaacatagatgataaaacagatttgcagggttgggcacggtggctcatacctatattcccagcactttgggagactcaagcgggaagattgcttgagcccaggagttcaagaccagcttgggcaacatagtgagaggctgtctctacaaaaaaatatttaaaaaatagccgggcatggtgtcacgtgcctgtagttccagctgcttgggaggctgaggtgggaggattgccagagcctgggaggttgaggctgcagtgagccatgatcacaccacagcactctagcctagagcctccctgtgtggcaggctctacacttcagataggcaacagatcgagaccttgtttcacaaaacgaacagatctgcaaagatcaacctgtcctaagtcatataatctctttgtgtaataataaaaaccccatcttctaaccttaaacctggtatttttttctacgaaactatgttctgcagtccaaattatttttctttattattttgaatcctaaagtagaaatagaaacttagaaaaataaaaagcaactcctttatgacatatgaggactttttcagttttaaataagaaaaacccaactcaaagtagcttaaataaaaggagacattttttgacttacataacctaaaagctctggcctggatctaggtgctcaacagatctcaagagtatctctcttattctctctccctcccttaccctcctcctcttttctctcttctgtatatatgttattttcaaacaggctctcacaagtagtggcaagatatagttcctaatagcttcaggtttgcattctacctactttagcaactatgatgagaagagagctacaatttgagcaaaaatttgtagggtgagttctgatttccctggattgaggcacatgcctattattcctgaaccaaatattctgtccagggaatggaattctctggggcatgtatctaaagctgaagtgtagagcctgccacacagggataataatagttttccaaagaaaaatcaaggaggggaaagaatgttggaaagagaaaaaaatatcagttgtctgcttcacatttgttctcaataattagtttcatagaagtgaaatactgtgtaacaccctaaactttagagattcttcgtagacaggaaaaataagaactcaatgaagttgtgacttcattcaaatcacgtagtttatatacatgctattagtaaaacccaggacagctgagtacaagttttacccttatattcacattgaggtccagatcctggttttgaatgagataattacgtgcagtcggactgttttctgatcctaaaaatagagacaataatatctatcttgtaaagttatggtagtgttaaagatatataaaatgttggcaagtaccttaatatacaataactactgctatatgttgtcattgtaataataatcatatttcttcctttgttgaattgctttcctgtagtaatcttattgtgatcatcctgaaacatagatttccgagcttcaagcaaacactattatgttgaaaaatctacattatttctaagtttagcagtgccagtggaaagtttattgaaatagaaaattacttttttaactgaggagtgtagattgtgaattcgtgattcatcttcttaggagatgatcggaatattgataaatattgatgcatagaatatgaacaaaacattacatatcttgtgctgtgatattaaagtagtattctgttctggtagtagtatggcagtattttaggtctgaaagatgtacataatctgtactttgaagtctgttttttaagagattaatcacaagagatttacataaaacaactaaggttaaaaataaatggtggattagagatacatcaggcaaatttcaatttcaaaagcagatgacagaatctcagtatcagggtagcatttaaagcaaaaagcattaaactggatcaaaaatgtcattttacatcaacacagggtacactccaggtaaagacttaacagttatgaacgaatgtgctaaacatcaaaatgtattaagtaaaagctgaaagaaatgaagaataattggtagaaaagcaatgataggaatccttaatgtacttcaaaaggcacgaagtaagaaggtacagtcatgtaccacataatgatgtttgagtcaacacctgacctggtatacgacaatggtcctataaaattataatggagctaaaaagcttctatcacctagtgatgttgaagccgttgcaatgcaatgtatcactcacatgtttgtggtaatgctggtgtaagcaaacttactgtactgtcagttgtataaaagcatagcacagttatgttcagcacataatactttataatgataaacgaatatgttactagtttacgtgtttacagtactattattttagcatgtgcttctgcttattaaaaaatgttaactataaaataatctttaggcagatcctacaggaggtattccagataaaggcattattgtcataggagatggcagctccatggatgttattgccccttaagaccttccagtgggacaagatgtataggtggaagacagtgatattgatgatcctgaccttgtagaggccaaggctaaagtatgtatttattagtttttaacaagagtttaaaaagtaaaaaaaaaaaataaatttaaaaatagaaaaaatcttaataaggatacaaagaaaaaatgtttttgtgtagctgtgtaatatgtttttgttttaagttaaatgttacaaaagagtcagagttaaatttttttatatttataaagtgaaaaagttataaaatgctaaggttaatttactgaagaaagaaaaaatttttaaacagatttagagtagcatgtttataaaatctacagtagtttacagtaatatcctaggccttcacattaactcaccactcacccactgactcacccagagcagcttccaatcctgtaagctccattcgtggtaagtgccctatacaggtgtacaatttttatatcctttataccatttttactgaaccttttctgtcttttagatacacaaataacattgtgttacagttgcctatgatattgaatacagtaacttactgtacaagtttgtagcataggagctgtatcatatagcctgggtgtgtagtgaactataccatctaggcttgtgtaagtatattttatgacacagtgatgaaatcatccagatacagtttctcttaagcaacacataactgtatatatatatatataggtggctttaataataaaataatgaaatatatttctttttttctgtcattgacaaaacaattaccagtcttactaattagatcaactgcaaaacaaaatctcactcaaaaataaaaatatgtaagtcccattccttgattacaattcattagaactggagatttttaaaaatgtttaaatttatatggaaatataaaatcatgttttaaataatttttgattcaatgaggaaatgtaaatttagaactaaagattaataactagagatttataaaggcaaaaatgttaatgaattaggaaacagtaaaccatttgaactaatctaaatactgattgcatgaaaatgccaataaaatcaatacatatttttaaaagccagtcaaggataaaagaaaagagggaaactaaaagtgagacattaagtatgagaaaggagataaaactaaagtgtggaggtgatgttaaaaattatattcaggtctgtgctaatcattttggaaatttcagtgagaagtgggcaattttcagtgaatatatcattgtaaatgctttgaggagagacaaaatctgaatagaccctgcaataatgaaaatgtctaggagccctcaagaaatacctggtttaaattgcatttcaggtggctggttatcacaccttgaagtatcaagtaattatgttatctaaattggaccaggtgttagaaaaatatgtgagacttcacaggtggctgcttatgtagcccttataccttaatctgataaaggtagcatatatttaaaaagagagaaaaccagaaggtacaatttagggaaaattaaatacttctatttggccaaagtaagagtacattcaagggaattgtgagaggtaagagtggaaacagaggttggagctgtatttttatgctgtgattgaattacagtgtgtgataaatattgctcttatttgggtagattaccatttaacattttgaattaattggtaattggattaatcttaacttttaaaaaactaatctgagagtggtataaaggatagattacagaatggataaagggtgataaatcagttggctatggcaaaattgcaggaagaaactgaaataggccacagaaaactgaaactgacattttgagtagtatttcagaatcaagatctggattttggcaactgaatagatgcgtaggaatcaaagatgagtatactaaatgaacttaatctatgatttgtctgtcattttattgtgtaccattagtgtgtatgcatgtatgtatgtgccaggtagttaataggctgactgtgtctcttagctccactctgctgcctgggcctttgccatagtgctggagttccctcacttctcttttctgtaaccctattatattactgctgtctctcagctgtgtttcattcctcaagcagaaagaagatgggaggatcatatagtagttgactagaagctgtggagtttgagtgctgggattatatctagttccattacttatgaagattatatctagttccattacttcacctcatctataaaatggtttaccaatagtacctaccttacatggttttatgagtattaaattatgtatttctaaagacatttagaacaatacaaagaatatagtgtgggctcaataagtgacgatggtgttagttattagaaggccatcgagtgctggagaaaataattgaatatcattgatggaaataaaggaagttttccacgttaaaaagcttcggtttttggaaatgtgtgttttcagtatttctgagattaccaggtagaaattccagccagatgttggaattctgcactggcagttgggaataaagtcatgttaaaggagataagttttggagttattgtgtaaaattggtaaagcactggaatagattggtttgacagaggggaaactctttttgagataggcctatatttagggacaagagaagagacaaccaataagggttgaaagaaaccttgagagagtaagtcctatgacagaagcagggaagtttcagaatgattgcagaaagatcagccaggctcttcctgttctccatcgtggtgcaggatcaaggtgaaaaggataaccccatgcaggaattttgcatctgcaggctccgcttcaacatctgtttaggagaaagtggagacagactgacctgagtaactaaggtcttggaacagcttacaggtcagaaccaggtgttttccaaagctagatatactgttagcccctttggcaacagaagaaatgaaaagactgttgtctgctgcacagttcgaggggccaaggcagacgaaatcctggagaatgatctaaaggtgcaggagtgtgagttaagaaaaaataacttctcagatactggaaactttggttttgggacccaggaacacattgatctgggtatcagatatgacccaagcattgatgtctacagcctggacttctatgtggtgctggaaaagccaggtttcatcattgcaggtaagaagtgcgggacaggcttcattggtgccaaatagaatcagcaaagaggaggccatgcgctggttccagcagaagtatgatgggatcatccttcctggcaaataaattctcatttctacccaaaagggtaataaaaagttttcagtgaaatgtttaaaaaaaaaataaaaaaaagatcagccagcagccaggatgggattgtgaaaacagcaggaaattagttgttgacaaagcattaatgaccattaagaaatcagcctcggctgggcatggtggctcatccctgtaatcgtaacactttgggaggccaaggcagatttcttgagtccaggagttgagaccagcctaggcaacatggcaaaaccctcgttcctccttaataaataaataaatgaataaataaacaagcaagcaagcagggcttggtgttaggcgcctgtactcctagctactcgggaggctgagggggttgaacctgggaggcaaaggttgcagtgagccaagattgcactactgcactccagcctgggtgacagagtgagaccatggcacccccctccccttcaaaaagaaatcagcctcataatcaatttctctggattaaggagtaagagcgtctcaagatttgctgtttatagagagggaggctaatagtttgagagagatacagaatctagggagagtgtgggtttttggtctttcagttgtttgccagccttggataaagaatgaagattacttgagcatattatttagagacaagtggagagaataaaggcacatgccagataggagataattaataaagcacttgtccaaaatagaaacttgttgaacaggaagagacgtcaagtataaggagattttaagatgggagaagggaattttgagtgtttgtattggatgacctcagggttcccagtaaagcaggagctgaattcatcgaaggtgatgtgttggtcaggatcaagagagaggttgggagaacaaagtgctaaaatcgttgtggtcaagagtttaaaaagtgtataccagaagagttattgagtgataggggtttgaaataggcaaagctgtaggaaagggggctggaaggaatattaggaggaacactaaatatacttctgaggtctacctcctggtctgtgaacataaaggagctgaaagagtaatggctgaagttctttagtttagctaaagttttttagctaaagctagaattgttgaaagttgtatttgaggaaaaaaagttaaggatacagttgaccgttcgataatgtagcccactgttgaccagaagccctacccacaacataaacaggcaataacacatattttgtatgtgtattatatagtatattcttaacaataaagtaaactagagaaaagaacatgtatcaagaaaatcataaggaagagaaaacacatttacagtactgtactgtatttattggtaccatacatttatgttgctgtttacaagatgaagcatctgtctgaaatggccagcagctacagctgtacctatctactgtacatatcaagcaagtcactttattcttataatgtctatgacttctctctttgaaagcgcttccatcatcactgttggcacttcatatgggtctcatggtgttaaggtttacggcattgcactagacacaatgaaaactacacaagagggccgggcacggtggctcacgcctgtaatcccagcactttgggaggccgaggcgggcggatcatgaggtcaggagattgagaccatcctggctaacacagtgaaaccctgtctctattaaaaataaaaaaattagccaggcatggtggcacgtgcctgtaatcccagctaatcgggaggctgaggcaggagaatcgctttttcccagaaggcgtaggttgcagtgagccgagatcgtgccactgcactccagcctggatgatagagggagactctgtcgcaaaaaaaaagaaaagaaaaagaaaagaaaagaaaaacacacaagagccgtgagagagatagcttttgattgcaatacacaatttactggagagatgagctgatcatacagagatgattagtgtcacacagtgttttaaacagattcttgcaaccctggagttcactgcagtagcaacagaagttagctatgagattttaacagtagtatagtatgtactacagttaatattaggtagctatgatttaatgctgcatctttgcatttgtttacatttatcttgactacaagtggtattatgtctggtcttaaggtttgtgtgcatatgttttgatgaattttaactttttataataggtttgtgtatattttatggcagtaaatgataaaacagactaatctacatatattttatgtagtcatgacataaacctaactttttcttaactttttgatatttctagtctatgtgtttcatctgcaggttttttcaaattgttgaaatctctgaaaaattttattgaaaaaaaatccatatatgtaagtggacccacacatttcaaacctgtgttcaagggtcagctgtgtaaataattttcctcaaaattaaagtggaaaaggagagttactactagtagaaagtagaactgtacccttgggcaggggtgtgtgtgtgtagttaaagatcaatttaacttaaaaggtcttggttagagaataaaactggcccttattagctttaatttacatgaaaaatgaaaaattttaggccaggcacagtggctcaggcctgtaatcccttaactttgggagaccaaggggagtggatcacttgaggtcaggagttcaagacagcctggccaacatgctgactcacccttccctactgaaaatacaaaagttagccaggcgcagtggccatccctacagtgctagctactcgggaggctgaggcaggagaattgcttgaacccgggaggcaaggttgcggtgagctgagatcgcaccactgcactccagactgggtgacagagcgagactccatctcaaaaaaaaaaaaaaaaaaaaagatttgaaaacagagtattttttaatctgcaagagctttacagccttttattcatatgtataagcttttaaagatgactaaaattttagtgtggactttccactcattggaaatcctatattgcaggtgttaattcaattttagtgagtgtgcatcatggctcagagagataggactagaatgaggaggtcacactggagactctgaaacagatacatgtcagcctcccaactttttaatatttgttaatctagaagtgttgaattttgggtgctgacaaggcagcaggtagataagaattgcaaagttaagaaaatagactgtaatattgatggtaaactaattgattaaattttaaaatgtacttttccatgtttttctttgaattgtcagtaattttgtttcaactggtattcatacatagattattcacccaatgttgacaactagtagatttatatattttttatgttgcctatccttttttgggtaaggattaacagaatgtataatcacctacattataggtacactactaatcacttgctacttgaaaaaacctaaagctttgaaatctttttattattgcacacaaacttatgccaaaaatggagataaagagaaaaatgtcatccactaaaccccaacaaataatgttgacaatgtggtctactcgtagactcgcattgacttaatttttttaaatcttattgcatattttgactagataataaatgcatatggttaaaaaattcacatggttcaaaaaagtacacctcccactcatcttccatgtgatatttcctttctgcttagcaattctgtatttatcttgctaaacatgaatgacagttgtttgctgaaattacattaaatgtgacgtaataaaatcattgtaagtttacattttttaactttaataatttttaatgttttaatgaagagtatgaagagtagtagtactgctcttcaaagtactactactttaccttaccttttactgttttgttaagaaaattaggccgggcgcagtggctcacgcctgtaatcccagcactttgggaggccgagacgggcggatcacgaggtcaggagatcgagaccatcctggctaacacggtgaaaccccgtctctactaaaaatacaaaaattagccgggcatggtggtgcgcgcctgtagtcccagctacacgggaggctgaggcaggagaatggcgtgaacccgggaggcagagcttgcagtgagccgagatcgcaccactgcactccagcctgggcgacagagcgaaactccgtctcaaaaaaaaaaaaaaaaaaaagaaaaaagaaaattatatagaaataaaattccagctattccaaaactgcaccttgaatacaggtacagaattgctaaaaccgtgtaccattttgtagttttagcatgcttttgtgtaactgcatctggtgtttgatcctcatgagagccctgttaaggaagggtacatattattgtcctcattttccttcgaaaacacatcagagtttgtattttgactgtcagcattcaaatacaagtcttttatttataaaattttggtctttatactgtggctaaaaatcttaaatcacttgtcatgatttgaaatggtttataccgattttttttgacatttatacacacatacacatatttttaaattgtctataataaaatcatgctcatctttgaaaaaatattaggagtactacagtggatacctacatacttgctattcagcatacctggttttttgtttgttttttgagacagtcttctctgtggtccaggttggagtgcagtggcacgatctcagctcattgcaacctccgtctcccaggctcaagtgattgtcctgcctcagcctcccaagtagctgggactgcaggtacacatcaccacgcccagctaattttttgtatttttggtagagacggggtttcaccatgttggccaggctggtctccaactcctgacctcaagtgatcagcccacctcggcctcccagagtgctgggattacaggttgtgagccactgcacctggcctgtttttaaattcacataaatatgttttatatttttcattagggagaagaaggttgtgtctacaatttttaagacattggggagatttagatgccagtagtaacttaaaagagaaataattgcaaattctttttcctcttgagtatactttcatttaaggtacagtgttctgtaagttacttttaccgttaaacttcttaatgttgcttattgtttgtcttacatttttaggttggatttttcttaagtcacatgtctaataaaaaaaacccttaaatacctcatttattcgtcttcgttagtgaatgcattgttgtacatattagatttttctctttagataactcagcttcccctattaagtgccacatgtattacaaaattttatttatgttttattgtttaataaactcttgagaactagatacattttaatcatttgtaatacttacattttctaaaacacttcatttttccctggtttcttcaacaaagagatgcatgtagtacaaggatagctttacctgtgttagaagattgtttcacacatttacatcaactgcatagtcctgtttttgttgggccctaatgccagcatcactttttgctactgctgtttctgccttaaaggcaatatgcctctgtctagtttgctgattctgatactctttcccctggaaagtaggtaatcaagtttgtgaggagctgtgtgtttaaggagtccataaatccttgtggggagccctaggtgtatagagcatagctgtagggcagaggcctttgacacttattctggatatgcagtggcctttgcctatggggttcatgggtcagagcgctgttgtgacctttgaataaatgggttgttatgataattgttttaagggaggagagttattctgatatcctttgtattgatattgctcttatttattattgagctggatttaagtattaatcatttaaggtcaaatttctaatgtatatatgttcttaaatggctacgacccagttaccatagcaatttagtgaaataactataatggaacattttttttcaatttggcttctcttttttttctgtccaccagggagtaactattcccagtcagaggcgctatgtgtattattatagctacctgttaaagaatcatctggattatagaccagtggcactgttgtttcacaagatgatgtttgaaactattccaatgttcagtggcggaacttgcagtaagtgcttgaaattctcatccttccatgtattggaacagttttcttaaccatatctagaagtttacataaaaatttagaaagaaatttaccacatttgaaatttatgcaggagactatatttctgaagcatttgaacaaattaattagctttgttgttcaactcattgggctaaagaagccaaaagcaatgggttttaatgtagtcgaagccaaattatatttatgaaagaaatattctgtgttataaccaccaaatacagcccaattctgactagatgatggaagaacctgtcccatcagaggtccagcatgaggtccagcagaggtccaccagaggagttcagcaatttgctgctcttagggcagggatcaattccttaatatcttaggaagactaggtattgacagtaatggtgacaaagcaatgaaaaggaaaggaagaagtgataagacatggcagcaagctgaagtatgatgagtaaagaataggaatcaaagtatgtggagtgttagagaaaacctggatttagatccagattctagtcctatctctgtcattaatctattgcgtaaccctgagcatatcatctacctctctttgagtttgcttgtcaataaaatgaagagactttgaaatctgagacttcctggataagtactaaatacagattatgtcactgatgtctgcctctatttatttctcccttttaccctaatctctataagtctacctcagtcatcctgatcctattctacttctctgatgttgttgtcagataggtgtgatcatcctcatcagatcttttctgtattcttagagacagataactttatcaaagaccacagatttattagtatagcatgttaaagtcttctaaagagtctcattgatgctcttttcatctcagtacaatttttaaaactgctgaatgcaaggtactgagctgttggaagtgactgacagatgaatgtaacagattcatagagaaggaaaaaggaagaaaaactcatgctcttcctatagtattgatatcagtgtaagagccaagagaaaggtataaagtatcatgcagatattaagggaaagaaaacattcactttagtaatctttcctcattttctagtttcctcttatgtactatgatttaatactgtagtaaagttttaataaaatatgagctatatgtaattaagtgggaggttgtggggctaggcacgaggctcacacgtgtaaccccagcactttgggaggctgaggcaggcggatcgcttgatctcaggagttcgagaccagcctggacaacaaggtgaaaccccatctctactaaaaacacaaaaattagctgggcatagtggcacacacctgtagtcccagcttcttgggaggctgaggcaggagaatcgcttgaatccaggaggcagaggttgcagttagccgagatcatgccactgcactgcagcctggacatcggagcaagactttgtcttagaaataaataaataaatataaaataaaataaatgggaagttgtgtatataaattataaatgctacattcagaaaagcttttgaaggttgtcagacagtttcttaaaggaagttcaccagttctttattgaacattgaagaaaacatacagtttagactggcattaaaactgaaagaagtggccagacgcagtggtagacgcagtggttcacgcctgtaatcccagcactttgggaggtcaaggtggatggatcacctgaggtcaggagtttgagatcaggctggccgacatggtgaaaccctgtctctactaaaaatacaaaaattagccaggcatggtgatgcgtgcctgtagtcccagctacttgggaggctgaggcaggagaattgcttgaagccgaaggtggaggttgcagtgagccgagattgcgtcattgcactccagccagggcggtaagagtgaggctccgtcttaaaaaaaaaataagtaaataaattaaaaactactgaaagaagtattacaggcaatgggaaatagcttgagtggaagtgcagcagaaggaaaaagctggacaagaatgtagtgtcagagaataggtatggaacgtgtgagtgactgttagaggatcttgaatggggataacagacttgatttcataaatactgagatgtcatgataatacttgaggactaaaccatgttttaaggacagttgtatgcaaagttgtaatcgcaagaggaaaaaatagtggaaaagaaaccagtaataaaacttgccttaatgcaggtatgctaagacaatcaaatgggatttcattaattttttatttgccatttatagccaaagattttgtaaaagttttgagcccagtcaggtgaaatagtctcagaaagaaagaaaagtgaatctgagacttggagacattaatgttgatattttggttttaaacgtgttttaaatccggtaaaagtgagcttctcacatgacaatattcagtgggtacttgggagtatgggttcgaatctaggtaggagatatatcgatattttgggcatcatcaggaaagggagagtagttaagcctttcatataaataatggtgtggcgtttgggcatgggaagtcttggaggaaaggaagaaaaggagagggtgaggactgagataagaatggcaacttgggtttaggaagaagaagaggaatcaatgtagagaacagatagtgctgaaaaatacagcatcttctgtagggattggcagctttttcttgatttttgtcttaatatttctaagagatggaaaaagctactatattctagacatttaacagggttaaaaatgttactaaaagatgatcaatgtggttttcattcaagactataacaatatgtatatatccaaggaaatttaattctgacttaaaaaaattgttttgcttgtatagatttagggacacaagtgtaattttgttacatgcatagagtgtatagtttcaagtcagggcttttaggttgtccatcatctgaataatatacattgtacccattaagtaatttctcatcttctactcaccgtttcaagtctccactatttatcattccattctttacattctgattttcatttactaggtgtattagtctgtttttgcattgctttaaagaaatacctgagactgagtattaaacaggtttaacctgttttctttatgaattcttctttaattggctcatggttctgcacgctgtacagaaagcatagcagcatctgcttctggggaggcctcaggaagcctccaatcatggctgaaggcaaaaggggagcatggtgagaatgggagcaagaaagagaaggagtggtggggagaaggtgccacccacttttaaatgccagctcacttaccaccaagaggatggcccaagccattcatgtgggatctgcccccatgattcaagcttcttccaccaggccccacctctagcactggggattacaattcaacctgagatttgggagggaaagatatccaaactatatcactaggtctggatcttgttatttattttttggaacatagtcatatatatccaaggatatatattgtagaagtccacagaaccatactaatattggacttctgcttagttaggtcttatctatctgaaacatgatattcatattgcagagaagattattttctttagtgattgaggaaatctttactacttatacatttttaatataatactataatatttgaagatgcacattttagatgtagtttaattgaaacctggaaatactattaatttgctttttaaagtcctaaaatcaggattatcagattctgaattaatggagtttaaatcaaaaagattacaaggcagtttttcagttttattctggttaattttatcacagctttggaatcctactttgtttatttgcttcttgaagttagatttcccagtgaaatttcagtatcacataaagtcttatgaaatggctcattgcactttgaactttgagtcaaggaagtgaaatttattgatagattgttggtgtaatatttatcctgtttgtggtagcttttttgaataataagtgtcttagaagaccatgttggagtagcctgcatgcttttatcaaacatattaattatgtgatggctgatactgctttagatattacatagaaatagtagtaggtgtttactaaactggaaatttcatttaacttggtttagctttgccttgttctcagtcacattgataaaaatgtaagacttttgtttatcttttagaataatgacaccttttggtgctgagaattttttgttttatatatatatatatatatacgtaatataaatacaaaatatatttaaatatgtataatatttctcatacactttatgtaactttgtgttcctgtttctctattatcttggcatgttttcttcaaatggcacttcttaacctcctaaggttaataaatttctttgtaatggacttttgttttctaattcctcagcgtatgacaaatgaattatactttgtcaaattatttaggtaactttcagtttttgaagtcctgggatcataacattcatcagtctttaatttctgtcattaaggtcattagctataaatgaatttatgagtagatttaaaaaataaaacatacaatccttcccttaacacactttcccaccatttggttcaactgctagtgtaaaagcatgatgaattttgagaagttatattttaccagttactttattttttaccagttatttaaaacagacatgagccaaagccagaatacttgttaatgaaaatgaggtgttttggaggaaaggaaggttgtgctgcagtttttacttgaaatctgttacatttctttacagaaatttcaaatctcttgtttcctgttatgatggtggcattatatacctttaaaatgtgagctataggaaaatgaatgatggttaattttttaataaatatttagacttgtgtttttgaaattttttataacattgttataggttttatcctctttctcttgtgaacatgtagtgatttgtattttgtgatctttgccgcatgctagagacttaagaatactatagcaaatatctgtcttctttacatttaaaaatttttcgtgactactccctgttgatatctgtcttaaaagttacttttgatgtagttcacaaatgtaccagataattatttcatcgtttttaatgcttaaagtttttatttgtattaggatttttagtatgattttaatgttaaagttttgaagttactctgccactagaagtctaattttgggacttactattcatgaaataggaattgacttttatataagtaataggaccttattttgaaggttcaaactggagaaaatcttacattgtttatatttttatttcatttatttcagttgatttgcttgagatcaagattgcagatacagaatccatatttcgtgtatattgctgatattaatcattaaaatcgtttttgacagtttgacagttaaaggcatttcctgtgaaataatactggtatgtatttaaccatgcagatcctcagtttgtggtctgccagctaaaggtgaagatatattcctccaattcaggacccacacgacgggaagacaagttcatgtactttgagttccctcagccgttacctgtgtgtggtgatatcaaagtagagttcttccacaaacagaacaagatgctaaaaaaggtttgtactttactttcattgggagaaatatccaaaataaggacagattaaaagctatattttattttatgacatgtaaggaactataatttgttttctattagatctgcaggtgttttgcttactctggcattggtgagacattataagggtaaataatcctgtttgaaggaaaaggccttatggcattgtaacatgagaggaatttttcttaacaaggatggttaactgagaagaaattagcatgggaccaatattttaaaaattttggtctataggtagaaatgagatctgttctgtggtcttatgtagtgacacaaaccactttttctccattttggcttatgtttctttttctttccttttttttttttttcctttttgttagagacagggtcttgttctattgcccaggctgagtagctaagactacaagcatgtgccaccacacccagctaattttttttatttttatttttgtagggacagggtctcactatgttgcccaggctggtctcaaactcctgggcacaagcagtcctcacgctttggcatcccaaagagttggaattacaggtgtgcgccatcatgcctggccttaacgtttcttaagacttgattattttctatttagcttctgtggatttactgattaattttttaactaggagagaaatcagtatgaagaggaagtaataaagaatgaaaacatggtatttaaatgtgcaggtttagaaagttaatgaagtttgaatttgattgatctgtatttagagaaggcaacgtcttattattttaaaaccaactatccgccctgtgcggtggctcacgcctgtaattccagcactttgggaggctgaggtgggcagatcagctgaggtcaggagttcgagaccagcctggccaacatggttaaaccccatctctactaaaaatacaaaaaaattagccgggtgtggtggcaggcgcctgttttcccagctactcaggaggcttgaggcaggataattgctgaacccgagaggcggaggttgcagtaagccaagaatgcaccattgtactccagcctgggcaacaagagtgaaactccatctcaaaaaaaaagaaaaaaaaaacaacaactatcttcatttaaaatattaaatgtgaatatttaaagtgagactaaggtgcaacatttttagatagtaatgaagaaaaggactaactttgtagtgttgctgccttgttaaacatactagatagcatattgccaatctttaaacattctcaatgataggatttatttactttttctgatttttagcttttcttttgaaagaaaataagaggaagtttcatttactgcaaaattttaaatgctgctttgatgtatcagtagagatataattttcctttatccagaatccaagtagctggaaaaaaaaatcaaaatatgctgaacttttttttttttagccagaaacccatttcctatcgtctgtacaaataaaagttaaatatatctcaataacttagaaaaattattttttgataatccaggaagtattagcaactgttttaaaattaagataactagtaagttttatttagctttcaaaaataggcatctacatcatcatctctgcatacctttaggaatttcctaattcttatttcccttcatctgtactttaacacatgcaaaattgaaggttagattaaatatttatgatttatttgtttatccttgactacataaatttccattttattgattttccctgccttatttaagaatatgctatgattaaaacacaaaaaattttagtataacccatatatatatagaattcacctttttgttatttaaatattattggcttattttcttctaagtaaaatacaattactggctaaaataattgaaataagcaaaaaaaaaattttaaagaccttgtatacaagattactttgccaggtactgttaaaagatgcaatgacatttaagacgtaacatccttaaggatcttattttctgggggataaaaaactttaagataaattagaataaaagatttaaatggcattttaaggtaccaggtaccagataagatgtcacaaggctgtatatcattaattgccaaatgatttatacaggccagatttctttgttggtcaatagaggtttaaagtgatgaacttctgttgtgtttttttattaagaaggtattatcttattagtaagaagtgattttttttaagaacaagcattttataacatcaaaagaaatcagtagtactctttcctaccccctcatatttattctgaaagtattcaagcattatattgtcatgtaagaaactggagcttctcatgtttgtattgctgtagaagtaaacatgtatttgccatgcgtcatcagggaagttgcactcaccgtccaagaacttttgttaaagtaaatcttggaataggtagctcatttgaaatgtagaaaaaattaaatccatatctgaattttgtttatatgtatgtacacgtaaactaaaaacgtatttaaagctagtattagatgagaaaagaggtttttttacttaaaattttaaggcaaaagtagtttatcttagatcttgtgagattgtatttttggtttaaaatttgagaatttgagtgaagaaaaatcatgtgaatgaaaatgcaacagataactcagattgccttataatagtctttgtgtttacctttattcagaatatcaaatgatagtttattttgttgactttttgcaaatgtttaacataggtgacagattttcttttttaaaaaaataaaacatcattaattaaatatgtcatttcatttctttttcttttctttttttttttttttaggacaaaatgtttcacttttgggtaaatacattcttcataccaggaccagaggaaacctcagaaaaagtagaaaatggaagtctatgtgatcaagaaatcgatagcatttgcagtatagagcgtgcagataatgacaaggaatatctagtacttactttaacaaaaaatgatcttgacaaagcaaataaagacaaagccaaccgatacttttctccaaattttaaggtcagttaaattaaacattttgtgggggttggtgacttgtatgtatgtgatgtgtgtttaattctaggagtacagctgatgaagaacttgcttgacaagtttttaacttatgtattatttcgaagcagtgtttacgtagcagtaacatgaaagtttctaataaaatacccaatgtacacagcgtcaaaaaagctgcatttttccttttcctaattctttgttgtttgctgaaatctggggcaaaggtgcgggagggggctaaatgactgggatatgaagtaggaatgggagaggaaagaaatagatgggaactcagtcatttgggaatgattcatatggaatgtttttactgcttccactcctgtctgccttccaatttattctcaatccctcagagtgatcttaaaaatagacttgattgtgtcacttctgtttacactttataaggaccttgtgtttttttttttaccatgacctacaaggcccagcataatttagcacagggctacctcctacatcagcactagtcaccttctctccttgtttcttgagattcagtcatactggtctttcttcagttcttcaaaatgctaagcttctgcctcttctagtctttccagttattttccttctccctgtaccttttcatctcagccttttcccctgaccttccatagctatcttcatatttccagccttagcttcaatctcatattctctgaagtcctttgattgtcctcccgttattctttttttaaaaatcctatttccttatattgtatcttagaattatttggtttgtttcatttttgcctatgtgtgatatatgtatttctacataggtatatatatctacttatagacaagaattcttcagattaaaaaaatctgatttgtaaacattcccaagtggttgtttaccatttttttcttcccccttcctatttcttattctacctgattttcccctgttcattcaccacactcgtttctttctcttttttactctctcttaatttttcattcaatttttataacatgtaataaatctaactgtagcgtctgagtattaagaatattgctagtaatacttcacctgtaatcccagcactttgggaggctaaggcaggcggatcacttgaggcccaggagtttaagaccagccggccaatatggcgaaaccctatctgcactacaaatacaaaaattagctgggcatggtgtcgcacacctgtaatcccagctacttgggaggctgaggcacaagaattgcttgagcctgtgagatggaggttgcagtgagccgagatcacaccagtgcacgtgcacttcagcctgggcaacagagcaagactctgtcttaaaaaaaaaaaaaaaaaaaaatatatacacacacacacacacacacacacacacacacacacacactattactaccaatatacatacatatatgtatgtatgtatgtatgtatattggtagtaatagtaatacttgggcccctgcacgttttaagtgaaaatagatctaatattaaatgtctttagcccttaaattttttttaagtgttcagaagtttccctttaaaaaaatttttaatatataataattgtacatatttatgggatacagagtgatattttcatgtatgcagtgtgtgatgatcaaatcaggataattagcatatggatcacctcaaacatttgtcatttctttgtgttaggaacattcaaaattctgtcttctagctatttgaaaatatacagtaaattattgttgactagttacagttctatagaacactataatttattcctcctgtgtgtaattttttatcttttaaccaacatctccctatcctcccctcccactccctttcccggcctctaataaccacactcttatgagctcaacttttttagcttccatatatgagtgagaacatacggtatttatctttctgtacctgacttattttacttaacatcatgtcctccgggctagacattctctttagaatccacaggtttcctttcttttctctaaatctgcattttgctcagccattaacttttaaaatgtctttttccctttagttttattgttttctattttaatattgcaagatgttttatatttgtgattacaaataaaaactccattattagtaaacaaatacaatgtcatatagtagtaagtgctataaaaaatagacaggatagaaagtaatcttggtttgtatgttttttgttttttagcaaagatgattagagaaggcccaaccaagcagataacatttaagcagaggcctaaatcatataagtgagttatacaaatatctgggaaaagagttaagagtacagatgcaaaagcccttagacaagagaatgagcttggtatatctgaagagtggataagtcattttgactgaaacagagtggacaagaaaaccagtccaagtgtaaagatactagtgtgtgttcagcataggaaggatgtaatctgaattttgtgtttaatattccctgtgttcatgctttcaaaatacagatgagtgaggaaagtagggagaaggggtaataaaggaagctgagagatcagttaagaggtacttgaatagtttagtaaagatgagagaagatgtttgcttcttgttgcccctcactgcttagaatagtggcagtgaagggtaacaagaagctgtcagattaacttaaagagtttactgatgcagtggatgttggttgtaagagaagaattgataatgactcttggataataggggagggaggggctgtcaatataatataatgaagaagggatttgaagtcatttctgatttaaatctcacatccactacctacttttaatagatatgtagcctttaacaagttccctaacctttctgggccttagctacctccccttggaaatggaaatacctaacatgtaaggttgttttgacagttattttcactaggcatgtaaaggcacttgactctctgttatagaccactgtattatgttaatgtccctctccttcctccctttaggtaaagtttttagggctaataaatcccaaatatcaatgttgatcagtagtttgtgtttgtgtagtgttgtttatatcaaaaactacattgaagccgggcacagtggttcacgcctaaaatcgcaacactttgggaggccaaggtgggcctcccaccttgaactaaggagtttgagaccagcctgggcaacatggtgaaatcccatctctacaaaaaatataaaagctagctgggtgtggtggcatgcacctgtagtcctagctacttgggaggctgaggttgatcctgggagtttgagcctgcagtgagctgtgaagatgccactgcactctagtctgggtgacagagcaagaccctgtctcaaaaacacacacacacacacacacacacacaaagaaatacattgatttttcacataggtagtaagagaaacattctttttgaactcagctgtttgtgaattgaattttgtaattcaaatgctatattatgtaaactattgatgactttcaatctgcatttattttgtataattatttagttaatatttgccacttatattccttaaaaaataaaattgaggttgggcgtggtggctcacacttgtaatcccagcactttgggaggctgaggcaggcagattgcctgagctcaggagtttgagatcagcctgggcaacatcatgaaccccatttctactaaaatacaaaaaattatctgggcatggtggtgtacacctgtagccctagctgtttgggaggctaaggcacgagaattgcttgaacccgggaggcagaggttgcagtgagccaagatcatgccactgcactccagcttggcaacagagcaagactcttgtctccagaaataaaaataaataaattgtattaacatcctgatagtttatctgtttagtacctagcaagaaagaaaatgttgaacatcttaagaagagggtcatttaaaaggcctcttaaagatcatgtttgttacagtgcttaaaaattaatatgttcatctgcaaaatggaataaaaaatctgttaaaaatatatttcactaaatagtttaagatgagtcatatttgtgggttttcattttaaattttctttctctaggtgaagctgtacttcacaaaaacagtagaggagccgtcaaatccagaggctagcagttcaacttctgtaacaccagatgttagtgacaatgaacctgatcattatagatattctgacaccactgactctgatccagagaatgaaccttttgatgaagatcagcatacacaaattacaaaagtctgaatttttttttatcaagagggataaaacaccatgaaaataaacttgaataaactgaaaatggacctttttttttttaatggcaataggacattgtgtcagattaccagttataggaacaattctcttttcctgaccaatcttgttttaccctatacatccacagggttttgacacttgttgtccagttgaaaaaaggttgtgtagctgtgtcatgtatatacctttttgtgtcaaaaggacatttaaaattcaattaggattaataaagatggcactttcccgttttattccagttttataaaaagtggagacagactgatgtgtatacgtaggaattttttccttttgtgttctgtcaccaactgaagtggctaaagagctttgtgatatactggttcacatcctacccctttgcacttgtggcaacagataagtttgcagttggctaagagaggtttccgaagggttttgctacattctaatgcatgtattcgggttaggggaatggagggaatgctcagaaaggaaataattttatgctggactctggaccatataccatctccagctatttacacacacctttctttagcatgctacagttattaatctggacattcgaggaattggccgctgtcactgcttgttgtttgcgcatttttttttaaagcatattggtgctagaaaaggcagctaaaggaagtgaatctgtattggggtacaggaatgaaccttctgcaacatcttaagatccacaaatgaagggatataaaaataatgtcataggtaagaaacacagcaacaatgacttaaccatataaatgtggaggctatcaacaaagaatgggcttgaaacattataaaaattgacaatgatttattaaatatgttttctcaattgtaacgacttctccatctcctgtgtaatcaaggccagtgctaaaattcagatgctgttagtacctacatcagtcaacaacttacacttattttactagttttcaatcataatacctgctgtggatgcttcatgtgctgcctgcaagcttcttttttctcattaaatataaaatattttgtaatgctgcacagaaattttcaatttgagattctacagtaagcgttttttttctttgaagatttatgatgcacttattcaatagctgtcagccgttccacccttttgaccttacacattctattacaatgaattttgcagttttgcacattttttaaatgtcattaactgttagggaattttacttgaatactgaatacatataatgtttatattaaaaaggacatttgtgttaaaaaggaaattagagttgcagtaaactttcaatgctgcacacaaaaaaaagacatttgatttttcagtagaaattgtcctacatgtgctttattgatttgctattgaaagaatagggttttttttttttttttttttttttttaaatgtgcagtgttgaatcatttcttcatagtgctcccccgagttgggactagggcttcaatttcacttcttaaaaaaaatcatcatatatttgatatgcccagactgcatacgattttaagcggagtacaactactattgtaaagctaatgtgaagatattattaaaaaggtttttttttccagaaatttggtgtcttcaaattataccttcaccttgacatttgaatatccagccattttgtttcttaatggtataaaattccattttcaataacttattggtgctgaaattgttcactagctgtggtctgacctagttaatttacaaatacagattgaataggacctactagagcagcatttatagagtttgatggcaaatagattaggcagaacttcatctaaaatattcttagtaaataatgttgacacgttttccataccttgtcagtttcattcaacaatttttaaatttttaacaaagctcttaggatttacacatttatatttaaacattgatatatagagtattgattgattgctcataagttaaattggtaaagttagagacaactattctaacacctcaccattgaaatttatatgccaccttgtctttcataaaagctgaaaattgttacctaaaatgaaaatcaacttcatgttttgaagatagttataaatattgttctttgttacaatttcgggcaccgcatattaaaacgtaactttattgttccaatatgtaacatggagggccaggtcataaataatgacattataatgggcttttgcactgttattatttttcctttggaatgtgaaggtctgaatgagggttttgattttgaatgtttcaatgtttttgagaagccttgcttacattttatggtgtagtcattggaaatggaaaaatggcattatatatattatatatataaatatatattatacatactctccttactttatttcagttaccatccccatagaatttgacaagaattgctatgactgaaaggttttcgagtcctaattaaaactttatttatggcagtattcataattagcctgaaatgcattctgtaggtaatctctgagtttctggaatattttcttagactttttggatgtgcagcagcttacatgtctgaagttacttgaaggcatcacttttaagaaagcttacagttgggccctgtaccatcccaagtcctttgtagctcctcttgaacatgtttgccatacttttaaaagggtagttgaataaatagcatcaccattctttgctgtggcacaggttataaacttaagtggagtttaccggcagcatcaaatgtttcagctttaaaaaataaaagtagggtacaagtttaatgtttagttctagaaattttgtgcaatatgttcataacgatggctgtggttgccacaaagtgcctcgtttacctttaaatactgttaatgtgtcatgcatgcagatggaaggggtggaactgtgcactaaagtgggggctttaactgtagtatttggcagagttgccttctacctgccagttcaaaagttcaacctgttttcatatagaatatatatactaaaaaatttcagtctgttaaacagccttactctgattcagcctcttcagatactcttgtgctgtgcagcagtggctctgtgtgtaaatgctatgcactgaggatacacaaaaataccaatatgatgtgtacaggataatgcctcatcccaatcagatgtccatttgttattgtgtttgttaacaaccctttatctcttagtgttataaactccacttaaaactgattaaagtctcattcttgtcattgtgtgggtgttttattaaatgagagtttataattcaaattgcttaagtccattgaagttttaattaatgggcagccaaatgtgaatacaaagttttcagtttttttttttcctgctgtccttcaaagcctactgtttaaaaaaaaaaaaaaaaaaaaacatggcctgagagtagagtatctgtctactcatgtttaattaaggaaaaacacttatttttagggctttagtcatcacttcataaattgtataagcacattaaatagcgttctagtcctgaaaaagtccaagattcttagaaaattgtgcatatttttattatgacagatgtttgaagataattccccagaatggatttgatactttagatttcaattttgtggcttttgtctattattctgtactctgccatcagcatatggaaagcttcatttactcatcatgacttgtgccatataaaaattgatatttcggaatagtctaaaggactttttgtacttgaatttaatcatgttgtttctaatattcttaaaagcttgaagactaaagcatatcctttcaacaaagcatagtaaggtaataagaaagtgtagtttgtacaagtgttaaaaaaataaagtagacaatgttacagtgggacttattatttcaagtttacattttctccatgtaattttttaaaaagtaaatgaaaaaatgtgcaataatgtaaaatatgaagtgtatgtgtacacacattttatttttcggtatcttgggtatacgtatggttgaaaactactggagtctaaaagtattctaatttataagaagacattttggtgatgtttgaaaaatagaaatgtgctagttttgtttttatatcatgtcctttgtacgttgtaatatgagctggcttggttcagtaaatgccatcaccatttccattgagaatttaaaactcaccagtgtttaatatgcaggcttccaaaggcttatgaaaaaaatcaagacccttaaatctagttaatttgctgctaacatgaaactctttggttcttttatttttgccagataattagacacacatctaaagcttagtcttaaatggcttaagtgtagctattgattagtgctgttgctagttcagaaagaaatgtttgtgaatggaaacaagaatattcagtccaaactgttgtaaggacagtacctgaaaaccaggaaacaggataatggaaaaagtcttttaaagatgaaatgttggagccaactttcttatagaattaattgtatgtggctatagaaagcctaatgattgttgcttatttttgagagcatattattcttttatgaccataatcttgctgtttttccatcttccaaaagatcttccttctaatatgtatatcagaatgtgggtagccagtcagacaaattcatattggttggtagctttaaaaagtttgtaatgtgaagacaggaaaggacaaaatagtttgctttggtggtagtactctggttgttaagctaggtattttgagactacttccccatcacaacaacaataaaataatcactcataatcctatcacctggagacatagccatcgttaatatgttagtgactatacaatcatgttttcttctgtatatccatgtatattctttaaaaatgaaatttatactgtacctgatctcaaagctttttagcttagtatatctgtcatgaatttgtaggatgttccattgcatcagaaaacggacagtgatttgattactttctaatgccacagatgcagattacatgtagttattgagaatcctttcgaattcagtggcttaatcatgaatgtctaaatattgttgacattaggatgatacatgtaaattaaagttacatttgtttagcatagacaagcttaacattgtagatgtttctcttcaaaaatcatcttaaacatttgcatttggaattgtgttaaatagaatgtgtgaaacactgtattagtaaacttcatcacctttctacttccttatagtttgaacttttcagtttttgtagttcccaaacagttgctcaatttagagcaaattaatttaacacctgccaaaaaaaggctgctgttggcttatcagttgtctttaaattcaaatgctcatgtgacttttatcacatcaaaaaatatttcattaatgattcacctttagctctgaaaattaccgcgtttagtaattatagtgggcttataaaaacatgcaactctttttgatagttatttgagaattttggtgaaaaatatttagctgagggcagtatagaacttataaaccaatatattgatatttttaaaacatttttacatataagtaaactgccatctttgagcataactacatttaaaaataaagctgcatatttttaaatcaagtgtttaacaagaatttatattttttattttttaaaattaaaaataatttatatttcctctgttgcatgaggattctcatctgtgcttataatggttagagattttatttgtgtggaatgaagtgaggcttgtagtcatggttctagtgtttcagtttgccaagtctgtttactgcagtgaaattcatcaaatgtttcagtgtggttttctgtagcctatcatttactggctatttttttatgtacacctttaggattttctgcctactctatccagttgtccaaatgatatcctacattttacaaatgccctttcagtttctattttctttttccattaaattgccctcatgtcctaatgtgcagtttgtaagtgtgtgtgtgtgtgtctgtgtgtgtgtgaatttgattttcaagagtgctagacttccaatttgagagattaaataatttaattcaggcaaacatttttcattggaatttcacagttcattgtaatgaaaatgttaatcctggatgacctttgacatacagtaatgaatcttggatattaatgaatttgttagtagcatcttgatgtgtgttttaatgagttattttcaaagttgtgcattaaaccaaagttggcatactggaagtgtttatatcaagttccatttggctactgatggacaaaaaatagaaatgccttcctatggagagtatttttcctttaaaaaattaaaaaggttaattattttgactattcggttttaaactttttattcaacaaataccaagtccctgctgtatatatgggtttggaatacattagtgatcaaaacacaccctctatccctgcccttgaagagtttacactccagtagaggaaacagaatttacattaacaattataaattgtgatacatgctgtggaaagtgaggtgcatgtgataatggttatcaaacattatgctccccaaaatttccatcaccttgcagttgaatgaggcctatgtaactagtttattctaatgtaatacagaaagtagtgtgacactccactttctgtaaaggcaatgaaaaaaatttaccatccagtttcttcccctactgctgtgattaaggattttgcatgttctagatggtgcagctttgtcagcctgggtcttgagtgatactggagcagaactccctcaaattgttccttctgccacgctaaacttgttagatattagcataaataagaaataaaccatttagactgatactttgggacaattttttatcacagtgtaagttatatcctgactaaaacagtgctttggaaagatcagggaagggtttcttgagctacaaaagggagttaagaatgaagcaaaatgaaatatggcatctttaaatgacatgatgcaataaactctaaattgcaagttattcaatagttactgagcaccagatatgtgtcagacactgttctagatgcttgggatacaagtgggtgaacagcaggaccttgccttcatggagcttacattctagcaagggaaaatagtcaacatactatatgtaaggtaatgcgtgctatagcagaaatgaaaggtaagggagctcaggattgctgggtggagagatttcagtgttgaatggtgtagtccagaacaggcctcactgggaaggtaagatttgaagactgctgactaacagtggcattgggattttccttcattctttcaaccagcgagatgcactcagaaccctctatacaattttattctcactttatacaactctgtacattagttctgagtttttaagatgattgttggcatatctagggagaatttttaggaataccacccaaaatagtcgcaatgttctaaaaccattttgttttctaaattggtttggcaaactctatacaaacagtctgttccttttcattctctaagttgagtttttaaatttaaattatactctttgtgcattttgacaatacttacctcttttcagaagacattaaagttctgttatggccttaaaacatttctgtaaagctgaaaggaaatatcatttatgatttattgatgggaaacagttacaaattttgagttacttgacaaacagaagggatgaaatttatggcctagtgttgtgttttcattcttaacccataagcaaaaatctctggaaaagtaccaatatctagtaaaagaaatattttttcacaaaaagtattttctattttcccctcacctcttacctcgtctcacctcaaagttcaagaagcttaactttgtgatcaaaggaaaatagtataattgaatatttgatactatagaaatttgcaactgtataagggcattattaaccttttgctagtgatcagtttcctatcagggcagccacataaaattaggcatgacactttaaaagaaaatgttgactcttaacttttcctcctctaatgcttaattttaaaatagatttaagcaactttaaagacattttcctgagcaactgcattttgttttcattctgaatttaatgagactctttttttctttaacattttactttgctttagaaaggatttaaggcaggtgaatgtgtttcccagtgtgagaaaaattgtcatgtaaatttagaaaaaagtattgtatatgtcccttgattttggcttaagagttagaatttacttagaatgtttcctgacccaacctcattggaatttgaaagtacattccaatagtattgtgagctgctcctttaaacattggtaagtaggcttcaaacttaattttcaaggaaataagccatgcttttactgtagggtttattaatctgaaatacctgagaatgaaaatagttatatgctcctatctaataatataaacagttaaatgtgacctgtaaatattgtgaaatttagcaaaaatataacctgtaaaaataatctctagtaagctaatattctctcagtaataaaacctagagagctaaagtagcccaattaactgacattagaacagatcgtgatatgtggaagaactattagtgaattatagtcatgtttatacttctcttttcaattataatcatgtccttgagatctcattttccagtccttattacctataaggaagagaaatatatgtaaatttcacaaatgcatacgaaaattaccaaacttcttaagtgttattcggtatttctgcagagatatcattaacaggaaagcccaatattttacatggttatctttaacaatggaagtacagtggttgtttaattaattagctaatacttcatttactgtgtatagtcataattcataagaataatacatatgtcttttaggattattagtactgtatattaaataaatgcttgaaagggaaaataccttttagtgtttggtaaaagagtaggcataaggtaaattttcccttctgttagactcagcagaactattcaatgtgtttagctgtccttggagaagactgagccattgttgctgtaaaaatccaatagggttaaaacaaaaatatcactttgaacatgatttacttggctaggagacacttgaagctttaagcaactcaaatctttctctagaaaattaaacacaattctacctcagaaaacttgaagacattgacaattcataggaattctgtgataagtcagctcacctacctaaagaccaaagtgaaggcgcacagcaagagaggaagctgaagtaaggagagaaaagaaaacagaaggaaaagcatggtaagagcccaaattaactctgactactgggggctgctacaggggatgggaagagaatagcattgttctgagcccacagtgtgtgtcatgctgcagtagtcagttcacaggcttgacccatccttcaatgattttatctcattttatgcacaaagactgaaagggaacttaaatcatccaggtgtctctcacaactagtaaatagagaagtggatttgaacccacagcagtcttatttctaccatattatgcatactacctcttaaacagaatcaagtttacaaagcaaacaaaaaagtctggccaggtttggtgtctcacacctgtaatcacagcactttgggaggctgagacaggaggattgcttgagcccaggagttcgagactagcctgaggaacatagcaagaccttgtctctacaaaaaagttaaaaaattatccaggcatggtggtgcatgcatatagtcccagatacttgggagaccgagctgggaggattgtttgagcctgggaggttgaggctacagtgagccatgatctgtgccttgcactccagcctgggcgacggggtgagacctcatctcttgaaaacaagtctaaaacaactcacaggtaatggagtcatgacaaattttttttttgtttactgacacaagaaaagcaagctaacacaaggcataaatcctgcaaaatgaacagcaaagaagataaatatttaacaattgttcaagctacaaatgagaaaattatgtatcttgcaacattcttgacaggtaagatgataagatgttggtatatatttttatatcaaaacccagaattacagttctttgatttgctagtttggtataaaatccattaaataaacttgtgccttatttttgcttgaactagaatgcccagactgtttaaagtgattggttctcagttaaataggccaaccggccacctaacaagtatttgttgcatgcctgctgtgtcaagttggaatacaatagtggagaagtgagaaaaggccatagattttacattttagagtgggaaaacagattttatacagagagttgagcaagtgtgatggcttgatgtaggaacaaacttggtcacttaggaaagcgtaagaagagaaaggctagagcagagtaagtgatgggagattgatgtaagataaattttggagaagtaggcaggagaacttctggtttcagccaaggtggaataaaaccactaaattctgtcccctactgatgacaaccatcaataaactttttctacactgttttattcaaactcattagtttatcttattctttgaatagatcttttaccccggcctgattttgtgacatcatcgatgagtcatttggaaaatacaggttcactgagttttgtagattttccagtgttgacacatttcattatgcaatgcagaaaaacaaatcacatttaaaaaaatatcacaacacttttttagagctgacaagaatagtctttaaatatttggaagaaggcagatgatgaaagagagtcaaaacttggaaaagcaacctatattagggatgtttcttttcttctattgtcttaacagcttcgccccaagggtgggccccacttgtggagctgcacaaccacggtgacttgagcagctcacactgagataaatcaagctttttggccagaggaaccagaaaaagagtctcctgtgggccagtggccatggagtatgagggtggggggagggttggggaaatcctgaagacaagagagctggaaaagggaatcctctaattctcagtttgaacttctacaagtcctgggctcactcctgagcttgcatgcacaggacagaccaaagaagcatagcaaaggctttgaaaatgaaacagattggaattatcactcataaatgatgagacaaaacttgcagcctgagcctaatcgagtggattgcctgaatcaattgatcaatcaatcatcaatcaaacattttcagaaaattttaacaggacccagagtctatgcaacacagtatccaacattacttaactaggaagaaccggaaaaatgtgacaaattcccagggaaaaagtcaatcaagagatggtaaccacaaaataacccagatgttggaattatcagatgtaaaaacagctattgtaattatgtttcatgagataaagataaacacacttggaatgaatggaaaggcagaagttctcagcaaggacacagaaattataaaaggaaccatgtggaaattttacaactgaaaggtacaatatctgaaataacatactagatgggcaatagaagaatggaaatgacagaagagtcagcaaacttgaagataactttataaatatccaattctaatcatggctttagagtcttaaaggtggatgaagcttcgaaaagtgaaatatatctgattgtaataagcctcagggagcctgaataaaatactaatccaagtgtatctatgtggctcccacagatacatttgaagaagttcctgttgtttgtcaattacattaagtaaaggaattagcattatcacaggtccaaacatggtgattatgagaatttgctgttacagtgttacacagtcttaatacgtcaaaacagcccaaggtgatgtatgcattgacagagttttctggttgggtccattaagtgtatacctgcagtaaaaagcaatttaaaatttagcaaagtcatcactagatcactgacacactcatccttagagacagtacatggtaattgcttcgctcacctgctcatattaacactttgattcagcctaacccttccgattcagcctttgcaacagcactgtttccaaatgtgacgttattacagagatgtcatacaaaaattgacctatcatgtaggcacaatgcatgcttttcaatattacagcagaaaaaaaaatgtgatatttaatgctgctagtgcctaggaatctggtatgagaaaacattaagatgagtttggaggaaaactgagctggtattatgtttggagaaatgacttcctgattcagaaagagaatttcaagactttagaatgcctcccattgttatattagaaccatattacttgtaaaaggtagtataaatttttgtaatggtgataattctgggtttaatagtttaacaagttttgccatttaattcccataatataggaagtacaattatatccatctcatacacaaggagctatggtacagaaaggttcaataacttgttgaatatagcagatctagtaaatggcaaagtcaggatttaaatgtaggtcaatttgattgccaagcctgggccatttactactgtgttatatatgttacttcctataaaaacttaacaagaaggtctttcattttcaaaccgaaatggacagaacactggtgtaagcagtgttctgaagcttttggtctcaggattcctttacactcttaaaacttactgaggatctcaaagggcttttgttattgatatttactacataagaaatgaaaactgagacatcatctgattattaaaaaaacaagctaatcacatgataatataaataacattgtagcgaaaataaccatgtattctaaaacaaaaatgttagtgatgaggtggtgttttgtttttttcatttttctgaatttttttttttttttttttttgagactgagtcttgctctgtcaccaggctggagcagtggtgcaatctcggttcactgcaacctccgcctcccgggttcaagtgattctcctgcctcagcctcccgagtagctgggattacaggtgtgtgccaccatgtccacctaatttttgtagtttttagtagagatgaggtttcaccatattgatcacgctggtctcaaactcctgacaggtgatccacccacctcggcctcccgaagtgctgggattacaggcatgagccaccacccccagcagacatacttcattatacagtgcaaaaaaaatcacattttaaaaatatcaccaccgagctcaccaggatagtctttacatattcggaagctgtcaagttcatggtagcaggtataagattttaaaaatactaattttggcttaaaagcttgaattttatcacttataacccacaggggtcatgggccacactttgaggatcactggtgttagaggtttggttggagagacgcaagtaagagaacatttccctaacatgcccaaacacattccttttcagagtgctgaaggaatttgaaaatgaggtctcagaattaccagcagtaattcctgataaattaagaaaaatgggagagagttcagagacaaagacatgagaaaagattgccataactctccagaaggatggattctgggtaatgaaggccagtatgtttaacactgattcccagaaaaagactttaatatattcagtagcagttagtttaagaacattagaagataattcggtgattaccagatgtcaatgagggctaggtaggtcatttcaaagccttctcaaatttcattttttctttatgatcacctgtcacagtgctttacgtgatgtacatacaaaaatatttgcataactgtataaaacagttgaataataactgtatagcatattgcttatataaactgcacaaatctcatttgaataaaaaccatttataaagtacttgcagtatgcaaaatgtgttgggcaaagggcaggtctgagaggcacacacgaggaaaactaaaacagaacagaagtctaatggtattttcaagtgttataaaatatgtgaagtctgccttgtgagagaaggtagcattggcttgtggaaagagcatagcacaggaaattagaacatctggttgctcatcctggctttaccatcaacttaatgaatgacctggagtaagttacttcacttcgagacctatgctctatatctgcaatattgaaaatgctggataagataatctctaaagccccagaaaaagatggagttgtactctttcactcccaggaacatatactggaacttatgagtagaactttggagagaccaagtttgcctcacaatgagtaatattctagttctgcactgtcgtatagtgacttcagtcactaagctacatgtctctatggagcacttgaaatgtgactggttcaaagtgagatttgctgtaagtataaattacacatcagattttgaaaacttagtataaaaagtagaaggcaaaatatcttgtcaattttttacattgattacatattgataatatttttgatatagtgagttaaattatatatataaattttttttttttttagatggggtttcactctgtcgcccaggctggggtgtggtggtgtgatcttggctcactataacctccaccacccaggctcaagccatcctcccacctcagcctctcaggtagctgggaccacagttgtgcaccaccatacatggctaattttctgcatttttggtagagatagggtttcaccatgttgcccaggctggtctcgaactgctgagctcaagtggtccaccttccttagcctcccagagtgctgggattacaggtatgagccacctcccagtctaaattaatatattttaaaaacatttcacctgatttcttttactttttaagatatatatggctaatggaacacttaaaattacatatatggctcatattatatttctactggacagggtaattctagctaatagagtttccaacaaaataataataacttgaagaggaacctaattttacttttcattttgcattttgaggtacacaagcagagactgggtcatagttctgacaagaggacctcacagaagactccatttggtgtgcatttgatctaaatttgtgttctcaatctgtgctcagatgaatgcttgggctccagcagcacccagatttgtcataggggaaggaggaggaggacaaagaggtctttctgtcttcccttcctctttcaaacagagagctgatcagtatgtattactgaataaatgaatgagtgtacaaaatatatttatgtatttcaggtaaaatggatgaagtttagggttcaggctttggaccaggtctggccgctggtttaattcttggtgccactgtttactagctctatgaccttacttactccctctgtgcctcagtttcttcatctgtaaatgtggggtttgcatgtacagttttgaatacagtatagtatatttccctagaaacatggcttactcctaaacatttggcaatgctattgcataaattaatcttgcaagacaaaactacacacaacaagaaactcttatcttgcctgtaaacaggttgttaaacatgttctcacttccttctgtcaccacctgtacagcatgtttttgaaggaattccacagtgcttgtgattaaagcaaatttgtacactgcctggacacccttagcaacttgatcttatggtagaagaacaatttgtggagatttggagacttcatattcaataaggacctgttaggggcaaagtgatacaaggtgccttctctttacttttgcctttcccatccaaacatgaccctgaacatctggcagcatgaaaaggggacatgcttatccaatacacctgctagctgactgccaggattctaaaacttaggtccaaatggtgagtagtgtttgcttttgtaatctaacactagttgacatcctactacagttctcttccattccacagactttctttcttatttatttatttatttatttttgagacagagtctcatttcgtagcccaagctggagtgcagtggcgtgatctcgactcactgcaagcgttgcctctgggccttaagtgattctcctgcatcagcctcccaaacacctgggactcgaagtgtgtgccaccacacccagtaaatttttttttaatttttagtagagacggggtttcaccgtgttgccctggatggtcttgaactcctgagctcaggcgatccatctgcctcgccctcccaaagtgttggaattacaggcgtgagccactggatccagcttccacagactttctttgcgctgcttggtccaaccctcacacctcttttattctcagaaacttcctttgccttctactgaatagagaaaattaaggctatcatgctgcctggactgcttcaacatcctgtccttcttttctctattatcaaccaactctctacctcccttgacctgcctccctctcattttagaggaaaaaaatatttcctttcttggttttttttttttttccccaagagggaatttcgctcctgttgcccagtcaggagtgcaatgtcacgagttcggctcactgcaacctctgcttcccgggttcaggtgattctcctgcctcaagcctcctgagtacttgggattacaggcatgcaccaccatgcccggctaatttttgcatttttagtagagacagggtttcaccatgttggtcaggctgctgttgaactcctgacctcaggtgatccgcccaccccagcctcccaaagtgctgggattacaggcgtgagccaccgtgcctggcctcccttcttgtttaaagctaacttttctacagtgctctttctttcccaggacaaagattgtgttttattggattatctctttctcttcttattttcaacatttgactctcttttggatcatttcttggagttgaaaaatattcttaaatctctccatttttatcaataaacagagaaaaaagaaagctttctctatcttgtattctatttagttatcactctcctctttctcttaaaactcaagttcaaaaaggaaaatctacccttgtctctacttcctcacatctcattcactaatttttctatttgtaatatctactattttaatttagttacaaatgcacatatgtgaaagaatatatgtaaaataatatatttaatatcaatttggatatattctatacccccctgacccaatcatttccactgaccttttccttccctccaccccaatcaccagctcccattgtaataggcttgattctgccatttccagttagcaaagatctcgcaaacctgtgttttccagcatccacctctctatcacctccagaattttcactcacttatttttttttatttttttttttattttttttttgagacggagtctcgctctgtcgcccaggctggagtgcagtggtgggatctcggctcactgcaagctccgcctcccgggttcacgccattctcctgcctcagcctcccaagtagctgggactacaggcgcccgccactacgcccggctaattttttgtatttttagtagagacggggtttcaccgttttagccgggatggtctcgatctcctgacctcgtgatccgcccgccttggcctcccaaagtgctgggattacaggcgtgagccatcgcgcccggcccactcacttatttttatactacttctacttcagcatatttaaacctcataagtcttaaagtccactgaacctaactctttttcattattcatttcccctcttctatccttacatatgttcctacccatttcctggttcatcattataatcactctcttatagcacattattaatttctttgacactctctttctcactcatttgcctggcaaatctgaaattgtgtatgtgctactgtatgcctacacctcagcagggtgaaacacaactgtgctttttggtctcactggatgttaatccccaaatatcaaaaatagacatcaccaccccacagtagtcttactttttcctgatacttttcctggtacatttactttcgcattctctaagataacaattttatgacttctcactcttcaaacttccaaaactgtgatcagtgactcaaacttacattttatacacatcaccatggaaattatcacatggaaacactcacatcttcttaccacagaatctactaacctatcagaatcagtaccatgctccgtgcctttcttcttgttacagtcaatgagtgattttactcatttcaaagaccaatctcttcatattgaattatatctcttctagtggtttaaaacctttttaatgcaatcattttctctaattagcaattcttttctttatacttgctcattcttattaccatacaagctcaagtacttctaccacataaactcccaaatccttaatacaccatacaaaaccttccatcatctggctgctcttatctttccattttcatctccctgtgtcctactttccagtttccatacaatttgtcaaatgattcttctgctatgtgtgtctaggcctttggttacattcagtgcacaaaaagcatgaaaatatgaccataatcaggaggaaaccaataatccattcacgataatgcccagcaaactaggaatagagaggaacttcctcaacttgataaagaacgtctacacaaaacctgctactaacatcacacttgatggtgagaaaccagatgcttttctgctaagatcagaaacaaggcaaggatgaactctttcaccactgcttttaaatatcatctggaagtcctcgctaatgaaataagaaaaaaggaaatgaaagatgtgtagactgggaaggaagacatgaaactgtttttgtttgtagatgacatgattgtctatgtagaaaatctgaaagaatcattaacaacaatgataaccttctggaactaataagtgattttaagaaggttgcagcacgcaaggttaacatacaaagtcaattgctttcctatataccaccaataaacaagtggaatttgaaattaaaaacacaataccatttacattagcacccctgcaaaataaaatactcaaatataaatctaacaaaatatgaacaagatctatgtgaagaaaactataaaacttttatgaaataaatcaaagaactacaaaaatgaagagatattccatgatcatggataaaaagtctcaatattgtcaagatgctagttatcctcaacttgatacacagattcaatgcaatccaaatcaaaatctcagcaagttaatttgtggatattgacaaaatgattctaaagtttatatgaagaggcaaaaaatccagaataacaaacacaatgttaaaggaagagaacaaagttggaagactgacactacctaacttcgagatttactgtaaatgtacagtaatcaagactgtggtattggtgagagaacagacaaaatagaccaatggaacagaatagagagcccagaaatagccccacataaatataatcaactaatttttgacaaaggagcaaagacaatgcaatggagaaagaacaatctgttcaataaatggtgctggaacaactggacgtccacatacaaaaaaaaaaaataaatctagacatacgccttatatccttcacaaaaattaactcaaaatgaatcatagacttaaatgtaaaatgcaaagctataaaactcctaagataaaacagagaaaaaaaactaggctgggtgaggtggcttacacctgtaatcccaacactttgggaggctgaggtgggcagatcacttgaggtctggagttcaagaccagcctggccaacatggtgaaaccctgtctctaccaaaaatacaaaaattagctgggcatggtggcatgcacctgtagtcccagctactcaggaggctgaagcaggagaatcgcttgaacccgggagggggaggttgcagtgagctgagatagaaccaccacagtccagcctgggtgacagagtcagactctgtctcaaaaaaaaaaaaaaaaaaaaattctaggtgaccttgggtatggcgatgactttttagatacaacaccaaaggtatactccatgaaagaaataataagctggaatttattatgttaaaaacttccgttatgtttttatatcttcacataaacacataaacagtcaaaagaatgaaaaacagtcaaagaatgagaaaacaaagccacagagtggagtaaaatatttgtaaaagacatacctgataaaggactatttccaaaatatataaagaactactaagtttcaacaattaaaaaagaacaacacaattaaaagtgggcaaaatatctaaacagacacttcatcaaagaagatatacaaatggcaaataggcatatgaaaggatactcagcagcatatgttattggtaaactgcaaattaaaacgagataccactataacctattaaaatggcaaaaataaatatccaatgctggtgagcatgtggggcaaaaggaattctcattcattgctgttgggaatgcaaaatggtacacgtacattgaaagacagtttggaagtttcttataaaactaaacacactcttatcataaccatataatccagaaattgtgctccttggtatttaccaaaatcagttgcaaacttatgtccacacaaaacatacacatgacccaaatgagttgcaaacctacgtcaacacaaaagcccgctcatgagtctttacagcaggtttattcataattgtgaaaatttggaagcaaccaggatgtccttcagtgggtgaatggataaataaactgggatgcatctagaaaatagagtattattcagtgctaacaaggaataagctatcaactcaggaaaagacatggaagaacattagatgcatatgactgagtgaaagaagccaatccaaaaagactacatactgtattactccaactatatgacattttgaaaaaggcaaaactatggagacagcttaaagatcagtggttgccagggattaggggtgaggaaaggatgaattggtagggcacagaggattttcagggcagtaaaattattcagtataacactataatggtagatacatcattacacatttgtccaaacccacagcatatataacaccaagagggaatcctgacataaactaaagacttcggggtcataaggacgtgccagtgttagtttgttgagtgtaacacatttatgactgtggtgtaggctgttgatagtagtggagactatgtgtttgtgggagcagggctatattaatgctttctgttcaattttgccatgaatccaaaaactactctaaaaaataaagtcaattattgaaaaaaaatcaaccaataaaaagacacagaaataacagagatattttaaagaatattacagttattataaatcttatatgttaaaggatgtaaaacaaaacatcaaaataatgaagagaaaaatggaacagataaaaatacaaatagaagttacagagctaaaaaataaaatatctgaaataaaagtaccgaatgaggttgaggttaagagcaatgtagacactgcagatgaaagattaggaaacgcaagggcatggaaacaggtgttatctaaaatacagcagagtgggaaaagactgaaaataaaaatgactagagcttcagtgagttgtgggacaaaattatataatctaatctacaggattgttttcacaaaaggagaagagtagggagaactgaaataaatattcaaggaagtaatagccataaaactttcaaatgtgataaaaattataagcccatagattcaagaataaacataaagaaaaccacatcaaggtatatcacaatcaaattgttgagaatcagtgatgaagagaaaaaccttaaaaagaaggtgggtggggtgggggaaaggcaccatcttcatctgttttatgatgttatagctgaatacctgagatggggtataatttataaagaacagaaatttatttcctacaattctagaggcttcccagcctctagacctcttggacttcccaaggaaaaggtggtggcaggtttggtgtctggtgagggcctggtctctgcttccaagatgttttcttgaatgctgcatcctatagaggggaggaactctgtttctcacatagcagagttgcttaagagagagaacccagctgggcgcggtggctcacccctgtaatcccaacactttgcgaggccgaggcaggtggatcacctgaggtcaggagtttgagaccagcctgaccaatatggtgaaagcccgtctctactaaaaaaaaaatacaaaaattagccaggcatagaggtgtgtgcctgtagtcccagctactcaggaggctgagacaggagaatcacttgaaccagcaaggtgaaggttgcagtgaactgagattgcaccactgcactccagccttggtgacagagcgagactctgtctcaaaaaaaaaaaaaaaaaaaaaaaaaaaaaaagggagagagagaacccatttccagaaccccttttattaaggcattaaacccactcatgagatctctcaaaggccccactcatcaataccattacattggcaattaaatttcaacacgaattttgaaggggaccaacactcaaagcatagcagatatcttatagagaaacaaacataagaagagcagttttcttgttgtaaaccatgtaggctacatgacagtggcatgatatcattttagagctaaaggaaaaaaggtcaacctagcaatctaaatccagggaaaatatctgtcaaaaatgaggggaaatgaagactatttcagaataaaggaaactaaaaaatcaattgccagaaaacttgaagaaggaaaatgatatcatatttggatctacacaaagaagtaaagaacaccagacatagtaagattgtaagtaaatataaaataaaatttctcttattttttagccatcttaaacataattgtattagtcaagattttccaaagaaacagacccagctgcatgtggatcgatggagagatagatataaatttgttttaaggaattgactcacaaaattgtggaaatttggtaagtccaaaatctgcagggtaggctggaagactagaggctcaagaaagagtgacaattttagtccaaaggtagaagctgtaatcccaggagagccagtggtatagttctagtccaagtttgaagtcctgagaacaaggagggctgatgacataagttctagttcaagggcaggagatcattgtcccagcttaaaaacagtcaggcagagagtggattctcccttaccactaaccatccttccttgattctattcagactccagtgaattggatgaggtgcatccgcattgaggaggtcaatctgttttactcagtctacctattcaaatgttaatctcttgcagaaacacccccaaagaccatgcagaataatgtttaattaaacatctggaccccccatggcccagtcaagttgacacacaacattattacaggcagtttgctggcagaattccttcttgctcaggagaagtcagtctttgttctattaaggtcttcatctgattggatgaggcacatccacattatggtaggtaatctgattactcaaagtccactgacttaaatgttcatctcatccaaaaaacaccttcagagaaacacatctagaacaatgtttgaccaaatatctgggcactgtggcccagtcaagttgacatgtaaaattagccatcgcaataattgactatttaaaataataacaatgtaccataaaatttataacatatgtaaaattgaaatttgtaatttaaaattggtaaatatgaagcatgacaagcaatagaaggaaatagaagtatactgtggtaaggtctttacactatacttgaggtggtataaaattacttgtaggtagactatgatttgttaaagatgtatattataaatcccagggcaaccacatcaaaactaaaacaaaaaggtgtagctgaatgccaggcatggtagctcatgcctataatcccagcacttttggaggccaaggtggggaagatcagttgagcccaggagcttgagaccagcctgggcaacatagcgggaccctgtctcaacaaaaaatacaaaaattagccggccatggtggcatgcacctgtagtcccagctattcaggaggctgaggtgggaggatcacctgagccctaggaggttgaggctgcagtgagctgagattgcatcactgtactccagcctgggtgatagagtgagacctcatctcagaaaaaaaaaaaatgtgtagccattagtgaagataaatgctatcataaaaaacaaatactcaatccaaaagaaagcaaggatgggggaaagggaataaagaacacatggaacaaataggaaatagcaataagatagatttaaatttaaccatatcaataattcattatgtgtaaatggtcttaatactccaatttaaaggcagagattgttagattggataaagagaaaaactatactcaactatgtgctataatgcaactaatatttcatataaagacaggttaaaaattaaaacaatgggaaaatatatactatgcaactacttatcaaaagaaatctggagtggctttattaatatcagagaagataaacttaagaacaaggaacattacaagtattaaagaagggcattttctaatgataaaggggtcaagtcaacaagaagccacagctattttaattgtgggtgcagctgataacagggctttaaatatattaaacaaaagctaaagacctgaaagtacacatagaaaacactacagttatagttggagattgtatttgtaaatataaagttaactaaaattaggcaaaattaatttaattttcatttattttgaatgtgtatttcattcatggtttaaaatcagaaggatatctagtgaaagtcttaactacactgtcacacatttcttagccagttctcattgaaaacaaccactgtgaccatttttaaaatattgccttaagatattttacgtatatgtaaaaaattttattctttttctttgctttctttttttgacagagtctcactctgttgcccaggctggagtgcagtggcgcgatctcgattcactgcatccttcgcctcacaggttcaaatgattcttgtgtctcggcctcctgagtagctgggattacaggcacgtgcaaccacacccggctaatttttgtattttcagtagagatggggtttcaccatgttggccaggctggtcttgaactcctgacctcaagtgatctgcccgcctcggcctcccaaagttctgggattacaggtgtaagccactgcacccggccctcttttttttcttttttaaaattcaaatggtagcacactattcacatttcagaactccattttattttaccacttattaatgttttgattccatgactggtacataaaactctaagtaagttttagggcttgtcactttctgcatagctctgtgaattcttcttttgtatgcaattgtgcatgctatggtttgaaatttttaaacacgtttcagtgccccagggagagtgtattcatttttttttaattgagatgtaattcacacactgtaacattcacctttttaaagtgtacactcgtggttttttgctatactcagaaagtggtgcagtcaccacccctttcttttccaaagcattttcatcactgtatccactagcaatcattctccatttccctttcccctatactctgaaaccagtaatctactttatgtctctacagatttgttttctctggacaattcatacaaatggagtcatatgataatagccttttgtgtctagcttcttcacttagtataatattttcaagtttcatctatgttgaataacttcattcctttctgtggctaaatatttcattttgtgactatatcatattttgtttgtattaaaattttaaacattcttcttaacaatatacatccttgtataattcaatcaatacaggaccaggtggcactatctagtatacattacaatagaagcccccttaggttgtgaatttgaaaaggcctattttcaatatattacaatttgatactttttatagggatatttagacatgagttaaacacacttaggagaatcaagaaaccttgccacaggtttctgggaaagatggcagtttacatataagtttctgaagcttttctcagaactggaaatggccaagagactttcaaaaaaacaaaatgctcccaactaatttgttttgaaaccagggaatgttgccaaccacattccacaaaattcaaagaatttctattagttatggtgcaatgagcccggactgaagagacagagaaaggaaatcctggaaacctaactggaaccccttaatttagagagaggctgaggcagagtgggagatgtggctgtaagagcatagcttatactgggccgggcgcggtggctctcgcctctaatcccagcactttgggaggccaaggcgggcagatcacgaggtcaagagatcgagaccatcctggccaaccaacatggtgaaaccccgtctctactaaaaatacaaacattagctaggcgtagtggcgcacgtctgtagtcccagctactcgggaggctgaggctggagaatcgcttgaacccgggaggcggaggttgcagtgagccgagatcgcgccactgtactccagcctgggcgacagagcgagattctgtctcaaaacaaaacaaaacagcaaaacaaaaaagagtacagcttatagtaacaaacagtaaattgagtattttctttgattcgtcttctcagtaacttagggcttcacttcaaggaaaagaaggactttcccaaacagaactatcagtgctcactttcccaccaagagaaagggaatctgtatcaaatggtgggtgtaccaagagcgactatcaaaccaaagagcaatggacatgggaatctaccttcctatgagacagggtgaaatatagaagtcaaataataaagattatttcctcttcctcacctgatcccaggcaggcctggcctcagctctctccaatattctttagatttcttttagaacagttatgagaagaccatacatcatcagccctccaaatggatctaagaggcgatttttaagtggtgcctaggattaataaggaggctcaggagaatacatacacactatttagggtaagtattccagtcctgtgtttacctccatatttctaaataatatgtcaatactctctttgctttttaactttagagattatattggcttctcattttggtagttgctgtttagcacacatatctcccaagccccaactcttatccctttttaatcctctggaatagttatatcactgtttctacttaaatcactattaaatatttttattaatggactaaattaatactgctgtcagcttggccaagcagtgtactgattgtttctttttcttattcaactttctgtttttcctgtacatagtaattgcctgatttattttcatttgttcatttccttgtaccttgcagcctttgctaatttttcttccttctttcagtatgatgtctgacatggtcaaatctggcaggaatctatccatttcatttatttttctgaagaccatcctgtgatcttcactgattaccctctaggcctgctatccagctgtcattctgggactttcctttgcttttctcctgtgttaggttccctatttcctgcctattgtatcctctttcttagtttaatccctattttcagtgatgcttataattctggagcttcctgagaaaaggtgcagaggaagttaattttgggggtgactttgcatgcctgaaaatatgttttttttttttttttttttctaattcctgtaatcccagcactttgggaggccaaggtgggtggatcacctgaggtcaggagttcaagaccagcatggccaacatggcgaaaccccatctctactaaaaatacaaaaattagctggtgctaattacaggtgagcacctgtaatcccagttactaggaaggctgaggcatgagaattgcttaatcctgggaggtggaggttgcagtgagccgagatcgcaccactgcactctagcctgggtgaaagagactctgcctaaaaaaaaaaaaagatgtttttttctattcttatacctatttaagagttttagttaggtactgacttgcaagtggcagctcatttactcatttaccctcagaatttagaatacgtgttcaatttatcttccctaggtatatttagaaaatacttaaatcgcaaatattaggtaccagacactgttctgcacgcttataaatacgaacctaccttatcctcataacaacactatcattactcacagagtatagagtcaggattcaaacccagcagccaggtttccaacctttcccctatgctgccacctctgatatagctgttgtaaagccaaataccatttggatttctgtcatttctatgggacctgtttttctgtctggaagcttttaggatcttcttttcatttttgatgttctaaaattttatgataatgtgtcctagggatcttttaatattcattgtgtgtaattgtggatccttttaatttatagttttatgtcttttaattctgggaattaagtgtgtgtatataaaataatttccctcccattattttctctgttcttcttcctttctggaactcatcttctggattgatcctgtttttttcatcagagctgctggcattcattaccactcagatgtgcctactaacataggcttcatcagaggctggactgataatttgattgcaaaaagctttctcttttttttctaaattctgggaggaagttttctgtattattattaacaagtccttaatttcaaagaaaagtgagggattttcttggtttgtatcttccaattgctctattgatttttaaaaagtcattgcagttgtatttttatttccaagatctctttcttgttctctgaatttttctgtctttttttttctttttctttttctttttttttttttttgagacagagtctcactctgttgctaggatggagtgcagtggtgtgatctcgactcactgcaacctctgcctcccgggtttgagcgattctcctgcttcagccttccgagcagctgggactacaggtgtgcaccaccatgcccagcttatttttgtattttttagtagagacggggtttcaccatgttggccaggatggtctcaatctcttgacctcatgatctgtctgcctcgcctcccaacgcttgttgggattacaggtgtgagcctctgtgcctggccgaacttttcttttatgtggcttcctgttgctgatttatacacacaatatattcttatcattctgagaggagtaattacagtgttttaaatttcaagagttcttcagcttttatactttttttcctcttcaagttcctttttacagtttgtttgaatctctatttttatattactgtaaatgtctggaaatacttggttgtccattcatattgtggcgcaagagatccaaaatcccaaggctcaattttccatttttctcccttttttatagtactggataactccattttctgtgtcttttcagggttaggcagagtcaatcaactttcttctcatcagtatctctctgcaagcacttgtttcactttctactgttcctataggtagttactatccttccacctcttttcatcttcatatttttgttggctacaaatgtctctagcattcattaaagttggaatttgtgtttctgttctcattctctttgttgtttgaaggagatttctgagagaagtgtgtagaagtatcttcattttgccattttaaatgaaagtcgaccactgttcttgaaacacctttctttcttggcttctgtgactccacagtctttgggtcctccttacatctcttccttctctactacatgtctaaactttggagtcccttaggttgtggtgtttggctacctactcatctccctctatacttctacccaaggtgctccaatccattcatgttaaatacctctgtatcctgatgacttctcaagtttctatttccatctactatttctccacagagtctccatgttatctatttttcacatgcatctcaagcttaacatgtccaaaactgaattcttgattttcagccctaaccctgttcttcccctagtctttcacatctcagtaaacagcagcaccgtccacctggttgttcaagccaaaggcctaatatttttttctccttatttaacaaccttctctccaccacatttaatccaatccatttaatctaagattcttattccaaagtataactttagtctttctctcttaattcaaactgctataatttcttactgggattactgacaaaccttcctaattggcccttgcttctccttttttctttcaaccccattcttcagatagcagtcctaataaacttgaagcatcgatcagaccatgtcagtcctttcccctaaagatcctaataacttctcctggcatttccaagaatgtccaagcttgtacaacactgggaatgacctggttttttccaacctctttatctcctgcagagtgattagggtggagaggaactggagtgtttctgacctcagagctttgcatgtgctggtatttttaccttgttctttgtattttttttgagacagagtcttgctctgtctcccaggctagagtgcactgatgtggtcttggctcgctgcaacttctgcctcctgggttcaagcaattcctgtgcctcagcctcctgagtagctgaaattacaggtgtgcaccaccacgtccggctaattttttgtatttttagtagagatggctttcatcacgttggctaggctggtctcgaactcctgacctcaggtgatctgcccaccccagcctcccaaagtgctgggattacaggcatgagccactgcacctggcctaaattttatcttaaatggtacttctcaagaggtctagggaatcacccaaacaaaagaggttccccaaagtattctttctgataggactccctttttcttaaatgactttccccagttcacattggatatttctttgcttacttgtttaaagatttttcacactagaagatgaaactgcaggctagtgctaagatttttttctttacctttatctcaataaatatattttgaaaattattttatttatctatttaagatgggatcttgctctgtcacccaggctggagttcagtggcgtgatcacagctcactgtggcctccaactcctgtgttcaagcaatcttctcaccttagcctcccgagtagctgggaccataggtgcacgccaccacactaggctaatattttatttttagaagtggtttcaactgtattgcccaggctggtctcgaactcctgtactcaagggatcctcctgcctcagcctcccaaattgctgagattacaggcatgtgccgctgcaacccgtcttattttttaaattaaatgaatgatttctaaagtaaacaacaatgaaacgaaacaaaacaaaaaatgggatatataaaatattctgccacataaaagtagaagattaccatagcattccccaaaccaaaggctgaacatactccagaaaagacagttcagttttagggagcatttgcttagaaatttcaggatacttaaacaaattatgatttctttgaataagcgatagaagatgttatggtaagacaacagaatgagaataaaaaagaaatgtaagactaaaatgtaagggaacaagtaagaccacaacagacattataatggcatatgaagcaatgaagagtggaattaccactgcagagaatcaagccagttaaatgagataagtataagaagctttgtaagaacatagaggaaataggcaagaagactagagagttagaaggaatataaaagatacaggagacaaataataatggtgtagcatgtggataattggtgatcccaaaagggagagaacaaataaaacaaagatgtttctgaaaaaaacaatgatccagatatgcctgtggctaatgtataattaatgacaaaatgaacaacacctagaattgtcttggtgacgttcttgcctttaaagttttatggaattattcattcaaaatttaaatataagtaaataaaacctcttgaagtgagaaatcatggtatggaagggctagtgacagtaataagccttgaaactattcaatttagaacagggtacataaaactatgataaacatcgtatattaggccactcttgtgttgccataaagaaatgcctgagactgggtagtttataagcaaagaggtttaattggctcatggttctgtgggctatccaggaagcatgctgctggtatctgctctgcttctggggaagcctcaggaagcttacaattatggcagatggtgaagcaggagcaggcacatcacatggcacaagcaagagcaggagagagagagttgtgtgggggaggtgccacaacttttcagtgaccaaatctcatgagaactcactatcatgaagacagtatcaagccataagggatttgtccccatgatccaaataccttccaccaggccccacctccaacactggggattacaattcaacatgagatttgggtggggacaaatatccaaactataccacatggttacctaaaagattgcaaaagtcacattattaaaaactgcaggtcaatatccctgatgaacttcaatgcaaaaatattcaataaagtactggcagactgaatctagcagctcatcaaaaggcttatccactacaatccagttggcttcatacccagatgcaaggctggttcaatatataaaaatcaataaatgtaattcatcacataaacagcactaaagacaaaaaccacatgattatctcaatagacacagaaaaagccttcaataaaattcaacatcccttcatgttaaaaactttcagtaaactaggtattgatggaacatacctacaaataagaagagccattcatgacagacctacagccaatatcatacggaatgggaaaaagctggaagcattcctcttgaaaaccggcacaagacaggatatcctctctcaccactcctattcaacatagtattggaagttctggccagggcaatcagacaagagaaagaaataaaacgtattcaaataggaagagaggaaatcaaactatctctgtttgcagatgacataatcttatatctagaaaaccccatcatcttagccccaaaacttcttaagctaataatcaacatcagcaaagtctcagcatagaaaatcaatgtgcaaaaatcacaggcattcctatacaccaacaatagacaagcagagagccaaatcatgaatgaacttccattctcattagatacaaagagaatagaatacctaggaatacagctaacaagggaagtaaaggacctcttcaaggagaactcagaccactgctcaaggaaatcagaatggacatgaacaaatggaaaaacattccatgctcacaggtaggcagaatcaatatcatgaaaatggccatactgcccaaagcaacttatagattgaatgctattcccattaaattaccattgacattcttcacagaattagaaataactactttaaaatttatatggaaccaaaaaagagtgcatatagtgaagacaatcctaagcaaaaagaacaaagctggaggcatcatgctacctacttcaaactatactacaaggctacagtaactgaaacagcatggtactggtaccaaaacagacatatagaacaatggaacagaatacagaactcagaaataagactgcacatctacaactatctgatcttcaacaaacctgacaaaaacaagcaatggggaaaggatttcctacttaatcaatggtgctgggagaactgtctagtcatatgcagaaaattgaaactggaccccttccttacacattatacaaaaattaactcaagatggattaaagacttaaatgtaaaatccaaaactataaaaaccctagaagaaaatctaggcaataccattcagcacataagcatgggcaaagatttcaaggtgaaaatgtcaaaagcaattgcaatgaaaacaaaaattgacaatcgggatctcactaaactgaagcacttctgcacagaaaaagaaaccatcatcagagtgaacagacaacctacagaatgggagaaaatgtgtgcagtctatccatccgacaaaggtccaataaccataatctacaaggaacttaagcaaattcacactaaaaagcaaacaacccccttaaaatgtgggcaaaggacatgaatagacacttctcaaaagaaaacatttatgtggccaacaaacatattaaaaaaagctcagcattactgataattagataaatgtaaatcaaaactatgatgagataccatctcataccagtcagaatagagattatcagaaagtcaagaaacaacagatgctggtgaggctgtggagaaataggaacacttttatgctgttcatgggaatgtaaattagctcaaccattgtggaagacagtgcggtgattcttccaagacctagaaccagaaataccatttgacacagctatcccattactgggtatatactcaaaggaatataaattattctgttataaagatacatgcacacatatgttcattgcagcactattcacaatagcaaagacatgaaatcaacccaaatgtctgtcaatgatagactggataaagaaaatgtagtacatgtacaccatggaatactatgcagccataaaagggaatgagatcatgtcctttgcagggacatggatggagctagaagccattatcctcagcaacctaacacaggaacagacaaccaaacagcacaccttctcatttataagtgggagctgaacaatgagaacacatagacacagggaggggaacaacacatgatggggcctgttggtggggtgtgggaaagggagagcatcaggaaaaacagctaatgcatgctgggcttaatacctaggtgatgggttgataggtgcagcaaaccaccatggctcatgtttacctgtgtaacaaacctgcacatcctgcacgtggatcccagaactttaaaacaaaaacaaacaaacaaaaaaaaaacccatcacattatcgaaaaagaaggatcactgcgcaaacaatgataatactctaaacatatacagtgttaacatttacaataatttgctgagacaaaagtcccaaaccttacctctcccaactggctagatggcaggtagaaggggaggccataggaggaagtatttttcatatgaaatgtcaatagatactcttcaattataatatagattgagaatattgaagggaagcatggatttaagtaattttttaaaaagataactactggcagaactaaaacatttcaaattattatcgaaggaaaacacatcagtgaaacagataaaagttagaaaatagtaataaacatttaaaaacacacaacaacatgacagaaataggaccaagtgtatattacttaaaaaaaataaaaatgaagtaaaatcacctaagaaagaaagaaagtaccacactgggtcaaaaacgaaatccaataaggtaatacctagaagagacatctacaaggagtaacaaaggaagtgtaaccactatttattgattcagtagatcaatgaatcaaattattgcatgcctaccatgtgcctagcactgctccacatgctgggttaaaaatgtaagaattagcaaaacatgacatacaaatacaaacaaaaataaagcaggagtcccaattttgacataggagtattttatgttcctgtaaaaatcaacaaataggacaaaaggattactgttttattgctgacatatagaaacctcaataaatacctaattgtagtgaaattatgtacaataaaaaacaacataatgataaaatacataatggaaaatctgtttgcgatgcgtgaagaaaaaaatctgtggtgggagaacattagcatattcctgtgagtcattaactaaccaaagaggaacaaatatgcattatactagagaaactgaataatataattaatgagatttatttgaatatataacaaattttattgtttgccaaaaaacctttctcctttttttttttttgagatggagttttgctcttgttgcccaggctggagtgcaatggcacgatctcagctcactgcaacctctgcctcctgggttcaagcgattatcctgcctcagcctctcaagtagctgggattaccggcgtccgccaccatgcttggctaatttttgtacttttagtagagacggggtttcaccatgttggacaggctggtctcgaactcctgacctcaggtgatccacctgcctcggcctcccaaagttctgggattataggcatgagccaccatgcccggcccaaaatcctcctttttgtgtccacaggacactaaatgacaaattcttaattcaaaatgactcatgtatttaattttattttaaaaatctgtatctgtaaacaaatatattcatatagataaaaataaagcaagatggagattgcagaattaatggtacttttactgggtggtggtatttctagttatcaatattttccttttatgtatatgcattttctaacatttctgcaatgaagaggtatataatcatacatcttaaaattatactttaattataattataatttaaaaaagataaaggagacagctggaaaatctatgctaaatgaagtattagaagagagatggactgtcacaaaagaaaggtgattagtaggaaggaggaagtgtgcacagagggaagaaaccttcagcgtgtcttgggaagctttattaaactacaagaactgagagaaatccaagaaaaatgcattgttagttcatatatggaaaaggaagccaaagtggtatataactagaatggaacttctcatcacaggcagagcacgttcccagagcatactgcaaagtaaagaacagaaagagaaatagatctcaaaggactatagatattaaaattaatgctaaccctggaaggattatgttactatgctgttgattttggaaagtgagggaaatttcaagcctcttgaaattataaaagacacagtggtatattaacaagaacccggtggaattgacatacttgagtcagaattcaaggtttgccacttaaccagcttgtaacctcattacttaaaggtctcttgccctctgttttcttatctataaaatagaaagatatgctttctttgaatgactataccgttgaatcatccaaaaagcacatatacacatacatgtatgtacatatatatgaatatatgtatatatacacagacatatgtagcatcaggcataagtgaatcctgagatggttaggaaaagctttcaaaagaaatggaattggatcttgaaagattaatttactaattaatatgtattgaatacttaccacaagccaggcacaggggccactgagggaaacaataggaacggccactgccctcaggaagcttctattccagtgatgagtaagactttttaaggcaaagaaggtgcatccctgagctagagaatagtggaagctggattacattctatatgtcaaatactgtaaaaaccttgacccaaattggtcttaattattcactaaaacctttaaatcacccatttacctagtatagcagtttatgggcagaaaaatgtatttacccaacaaacaatggcatgcttctgtaaactcagtactctgagagtcctttaaagataacataataagagcatgcgtattatttctttaagaaactcgtagtgcagtaggaaagttaagacatatggagccatgtctacaatgtagtgcaaaatattagagaagggactaaggtggtgcatgagaacagaaaggttatgttggatagggaggcatcatgggaattccatagagggatattggcattcaaaatacaccttgcaggaaagccagaatctggacatactaatccttgggcaggaggaagtgtgatagagcacactcctgagatatgaaaagggatgaaaaaaggccagagaagaaaaataagttatcaataatcaaataattggatttgattagattgataataatcacagcatcattttttttctttctacataatttcaaagattatggtttgggcagtaataatgcaggcctatagaactgaataggtaattatgggacattggtaaagatcaaattcttaagtgttaatttcttactacctatgatcagcatttcttaagacgagtgggaaattaggacccacatgttgagtaagatgttcatgagaatgtcaaggagccttgtcaaccttgatggacaactgatgttaaaaagacaataaagtaattctcataatttaatggaaagagattgctatttaatgccagaagaggaagaactaatatatgcaaaggcctgtagaaatgaggaatatgaacaaaataatcccctttttgtttcaggaaaatgtaaagtagtgccccagggactgttggcaaatattatcatctttgaaagctactgcttaacacaaattccgggaagctggaggcttctgggtaatgtgaatcacaaggaaagaatgccccattttgtggctgaaacttttaaatgggatactggttgatctcagtaaagaagtctgggggtcagagttagtttggaagaattttcagcctgttgctgtagaggctgctacacagggccctgactttggtttgcttcttttttggcctgtctgattagaatgttccatgtgaccatctgctgtgggaaccactcacatctctagggacatgattctttctcctcaatatatagaattataactgttaagaattttgctgaagatgtagcttaagtaggcacattggctcacgcctataatcctagcactttgggaggccgaggctgaggtgggtgaattgcttgagccaagaggttgagaccagcctgggaaacatgatgaaaccccatctctacaaaaaatacaaaaattaggccaggcatggtggtgcatgcctgtagtcccacctactcggggtgctgaggtgggaggatcgcttgaacctaggaggctgaggttgcggtgagccgagatcatgccactacactccagcaaggacgacagagccgaactctgtcttaaaaaacaaaacaaaacaacaaacacagtgtaacagggttctactcattcttttaaatgaatatttattaagcactgattgtatacatggttcctgcctttgagaatttttatttcatttagtggcaaaatatacatatttcatatttatatatattgtgcatttcactgactggatcttgaaagagagagagctatataatataaatataacatttaataaatataaaatataaatttataaataataaatatataaaatttaataaatataaaatgtaaatataaaatttaccttatatgtatcctgatatgtgtatatatatcctgatatatgtatatttatgttttttatatatatatgtatatatatgtgtgtatatatatatattttttttttatttatttttatttttttgagatggagtcttgctctatcgcccaggctgaagttcagtggcacgatctcggctcactgcaagctccgcctcctgggttcacgctattctcctgcctcagcctcccaagtagctgggactacaggcacccgccaccatgcccagctaattttttgtattttttagtagagacggggtttcaccatgttagccaggatggtctcgatctcctgaccttgtgatccaccgcctcggcctcccaaagtgctgggattacaggcatgagccactgtgcccggccatatatatttctttaaagtaaaaatcctggccagtgctaactcatcatcctactttaaaataaacaaatatatatgtatattgaggttgatatttctctatatatttataaatatttctacagaaataaatatacatatatatacacacaagtatctagtcagtgaaatgcatgaaaaatgattataatgtgatcagtggtgtagtaggtctctatagtaaatgctatgggaagaggctgtatgaaccgctttgtgctagagatagcttcaaaaaagatattatctgagcctctttgtgaggaatgggaggttggtggtaggaaaaggcagggtgaagggtgggggaaggaaaacactttgggagagagggtaaaagacttggatgggcaaaggcttacactatatggtcaaggaactacaaagagctccgtggggttagagcatcaatgaatgggaataatgcaggacatgaggctggaaagaatttgggacctggccaggatcggccttgtgcttaggatgaggcatgagcattggccaggactggcgagagtgtcattgaaagtttctacacagatctacgccacgtgaaaatgtactgagcaagagactgaagagagggaggtgagttaggaggagtaaagaaaggagaagactttcctttctttgacttgccactgcatagcagacggagggcagggaaacctagcaatgccaacaatgtagaatgtgtaggatttggggaactaaatgtaaatggtgaggggagataaggtaattcccagggcgcctgcttgagttgagtaagttgagtaaccaattgataatgatggtgccatctactcaagaagaagagtaaatttggtatttttctttgtggttgtccctatatgttgatttttatttttggctgtagttccagaaggtgatggaattcaacaagctgatgggattcaaaatggaaaatgttaagcctacctaaatggtggctgccccattgctgttagggagagagtagatggcacacccattgctttctccattagcagcttgcttcctagagagacacagattatgcaagcatagaataacaaggcaaagtgacaattacagagtagaggttgctgagctgggggaggagttagcttccaactttgctggggatagaacctgaggtggagtgttgctaaaggcttcctgtagaaagggactctttttgtttaattaaaattttttgtttataattattattggtacataatagttctatatatttatggagtacatgtgatgttttgatataggcatacaatgtgtaatgatgaaataatgataattggggtatccatcagctcaagcatagacaaaatttacttcatgaacaacctaaatgtccatcaatagacaaaaggataaaaaaatgtggtacatatacataatgaagtactattcagccataaaaagaatgaaatcctgtcatttgcaacaacatgaatggaactggaagtcattaagtgaaataaaccagacacagaaagatgaattttacatgttttcactcatatgtgggagctaaaaattttaaaaactgaattcatggagatagagagtagaatgatgcttatcagagactgggaagagtggcaggagtggaggataaagtgaggatggttaatgggtacataaatacatttagaatgaataagttctagggccaggtgtggtggctcattcctgtaatcccagaactttgggagtacgaggcaggcagatcacgtgaggtcagaagttctagaccagcctggccaacatggtgaaacactgtctctactaaaaatacaaaaaattagctgggcatggtggcctgcacctgtaatcccagctactcgggaagctgaggcacaagaatcgcttgaacctgggaggaagaggttgcagtgaactgagattgtgccactgcactccagcctgggtgacagagtgagattctgtctcaaaaaaacccctcaaacatgaataagatccagtcttttgtagcataatagggtgacttttttttttttttttgagacggagtttcactcttattgcccaggctggagtgcaagggtgctatcttggctcaccacaacctccgcctcctgggttcaagtgattctcctgcctcagcctcccaagtagctgggattacaggcatgtgccactacgctcagctaattttgtaattttagtagagacagggtttctccatgttggtcaggctggtcttgaactcccgacctcaggtgatctgcccaccttggcctcccaaagtgctgggatcacaggcatgagccaccgtacctggccaatagggtgactattgttaacataatttattgtatagcctgagcaacatagtgagaccctgtctctacaaaaaataaaaaaaaaattagctgggcatggtgacatgcacctgtggtccaagtttctagggaggccaatgtaggaggatcacttgagcccagagattgaggctgcagtgagctgtgatcacgtcactgtactctagcctgggtggcaaagtgagaccctgtctcaaaaagaagaaaaaatttattgtatatctaagtataattaaagagtggaactagaatgctcctaacatgaagggactcttgagctgaggcttgagggatatgtggaagttttacaggtgaaaaagtgagaaatgtacatgtaaagacataacatacgagaaaatatggcttatttaagcaacgacaatggtccagtttcattaatactagtatgagaggggaagaatgacatgaaatgaggctagaaaggtaatcagtagcagaacagtaaaagtaagaagttaccatttttaccctatagttgatgaagaggcattggagaattttgaggaggatcttgatagctgatctgatcacttgctcattcactcattcactcactcaccaaatatgatctaggttcaatgttgggccactctggtagcaatgtgaaaaatgaataaataaaagatatttggcagagaacaccagctgttttcaccaaatgtacttctgcctggatacacagccagaccacacatctcagtctctcttgcagttaggtgtggtcatgtgaccttagtctagtctatggaatgtgtgcaaaagtgagttgtgttgtattctgtccaggcccattaaaacctcacgtgtgctgggttttatgctggctgactgagttgagatcttggaaaccaagtcatggagatactagtgctgtcaccagaataggcctccctactgtcttgaaacacatactggactgttaagtgggccagaagtaaacatttatgtgtttacttataagttgagtcattgtgtatttggatctgttgccattgctcagcctatcctaataacacagagtgacataagaaattgggtgaaaacatgaatatctcagctgggggcagtggaagtggggatagagaaaagtaggggagataataaattgctatttaggacatagagtcaacagcatctgaaagatggttggctgtagttggtgagattggaggccaggtccagcatgactccaaggtttctgacttgggcaactataccaagaaatcccacaaagactaacattatatcttacctttaccattttgacttgtgttattattatttaaaatttcataagcttttttttgagactgggtctctctgtcacccaggctgcagtgcagtggtatgatcatggctcactgcagcctcagcttcataggttcaagcaacccttctgcctcagcttcccaagtagttgggactacaggcacacatcaccacacctgactcattttaaaaaaaactttttttgtggagagagggtcttgctatgttgcccagaatggtcttgaacttctggcttcaagtgatcttctgcctaggcctcccaaagtgctgagattacaggcatgagccactgcacccagccaatataaacatgttttgattcaaaggatgtaatattcttgctaaagatatctagctagtataccatttacacttataaactattataaatcagttagtatttatattatatttccttatttaactatttgaaatattttaattgtttttgtatgtgaaaatagacagcttttcacaactgacattattataattttacttttgtagtaatacatatttttcaactaactgatagaatttctgcatatatagttttcaagattttcactctgttacatgtcaaacgtttatatttgaaagtgagttattttgatgttaacaataaatctgaatgacagactttttctatactactgtgatgtggtcaaatatgatggaaacctatgtgatcacatggttgtcagtatgcacaagttcaggggtgccagaagtagcaatgaagttggcattcagttatttggtctttattgttatttatttatttattttgagatgaagtcttgttctgtcgcccaggctggagtgcagtggcgtgatctcggctcactgcaacctccacctcccgagttcaagtgattctcctgcctcagcctcccgagtagctgggattacaggtgcgcaccaccatgcctggctaatttttgtatttttagtagagatgggatttcaccatgttggccaggctggtcttgaactcctgccctcaggtgatccgcctgcctcggcctcccaaagtgctaggattacaggtgtgagccactgcgccaggctagttatttggtctttcaaagctgagcactgaggtagaaggacactgagagaatgtctagattaataagagaatgaggaacgaataactaattaatttaataaatatttatttagagtccattatgggtcaagcactgttctgggtattgggatatgttagtgaaaaacacagacagatctctgtctttatggaacatacatattctcatgtgatggaatcaagaaaagtgaggaagagaaagcttcaaggagggaggtatgatcaacaatttcaagtctaaacaaattaaaataggactgaaaaatgtctgttgggtttggcagttaaggagttaagctgctggtctagaggaattattgtattggaagccagattaccatgggctgagtgtgaatgggaggtgaagaagtagtgtcttagtccatttctgctgttataaggaaatactctaggctgggttatttacaaacaacagaaatctatttctcacagttctggaggctgggaagtccaagattgaggtaccagcagatttcgtgtctggtgagggctcattcttgagagatggtgccttctatgtgtcctcacagagcagaaagggcaaggcaactcctttcaacctgttgaaaataaggtcactaagccctcatgacttaattacttcctaaaacattcctcctcttaatgctatcacattgggtattagtattttgtatagtttggctttgtccccactcaaatctctaattgtagctcccataattccgctgcgttgtgggagggacctggtgggaggtaattgaatgataagggcaggtctttcctgtgctgttcttgtgacagtgaatatgtctcatgagatctgatggttttataaaggtgagttcccctgcacatgctctctcttgcctactgccatgtaagacatgactttgcttgtcattcgccttctgccatgattgtgaggcctccccagccatgtggaactgtgaatccattaaacctctttcctttataaattacccagtctcaggtatgtcttcattagcactgtgagaacagactaacacagtattccaacatataaattttgaggggacatgtactttcaggctattgtataggaatcatttagaagttcagctattaagagaaggggaaaggtcagtagctagaagaaaggctgaaaggatatttgttgtaacctgggaaaggcttgagtgtgttatgctgatggtacaaaggagtgtcaacatctggaagaataaggagaattagtaagaggtcagtggtcaggcatgaggcgaggtagaggtagagagatctttgaaagtgccaaagtcgatgggaaggagagctgtagggagagagtctccttaggttgctggaatgaccttagcaatatgctctccactgtcactaatgggaaacagtgacacacgtggcacttattttcaagagccatggcaagagatgatctccaactcctgggtccttattaggatccaacctgcctaagcacagtgcttccttccaaaccacagaaaagacaatcagaagtggtggggacgccactcaaacctgaagccaccgtgcaggaaacttaggccttagaaatgaggaaatggcaggattccttctgcttcattttggttttcagaaaatgaggagttctgcataggaacttggagtgacagactctgagtggtaggataaggtcaagcagcttgttcactgttcaagggcacctgggctagggaacaaatggggaccgaaaatcctctgttcatcaaactcatgcctggggcataggactgcaaagagacctctctctctctctcttttaaagagacagggtctcactatgttgcccaggctggtcttgaactcttggccttaaacaatcctcctgacccagcctcccaaagtgctgtgattacaggcattagccactgcacttggcttattattgttattattttctaattcatacagactgctagcagcaatcctggccaaactcacatactactatagaagctctacctactgactcagaaattattccttatctttaaggagcttaattccacactcttgaacacccggaacacaattctgttcccagggtgtagtagggacttcttgagtgggtatttttagaagtgctatttttgataaccaagtaatcatccacagatgcgtcacacaagcagtaatgtgaatattaaagaaacacgtgggaaacatctacaacctcattagaaagcaaagaaagtagaatagagcagcctcgaggcaacattttatacataatcatatcaaaattgaatgattatgccctatgtggggaagtgggtgataaaacttacactcacagggcagctggcatcatttgaggacaaacctgtttggaaagcagcatgacaacatgcagcatgaataataaagatgcccctcttctttttccccatgaagttatcccatgcctgaacatttatcccatgttactaattcagaaaaaagccttatatatatgatatgaagttgttcattgcaacgttatctataatgtcagataaataggaactcaagaaataaatcatgcactgatcaaggaataaatgaataagttccacgaaaggaacattccatatagggtagcttcataataatggtatgcttccagaagccatatgtgcaaaatgtgtgccactcaaataccatatacaaattatacagtggtgtcttttgttttcacaagtaatcttaaacaaattttttgcaaggaaaaaaatctaggcattgtttaaatgcttccaatagagtagtgagtagtggttctcaaacttaattgtgtatcagaatcacctggatcatcccccactgcccctcagagattctgattcagtaggtttgggtttgggcctgagcatcagcttttttttttttttttttttttgagatggagtctcactctgtctccaaggctggagtgcagtggtgcgatctcggctcactgcaatattcacctcctgggttcaagcgattcccctgcctcagcctcccgagtagctaggattacagacgcgcaccaccacgcccagataatttttgtatttttagtagagacggggtttcgccatgttggccaggctggtctcgaactcccgacctgagctgatctgcccactgcggcctcccaaagtgctgggattacagacatgagccaccgcgcctggctgagcatcagcatttctaacacattcccaggagatgctgatgctgctggtcctgacactttactttgagaaacactagtttagaaaaactagcttttgcccagggaatcacaattatcactaagcatctaagtagaaagcaaaaacaaagacatacattccttgaggtcacaaattgtgtcttgcttatccatgcatcctcggcaacctgactccatgcagtgtctacataaatgctttttgaattgagttgcatccataggcagaaatttcaataaacagtggggatcttcactttccaatttcttgttatcaactgggtcatagtagcattcatgttgaagccatcacggtcagcacaggcactctgagctgacccttagaatagtcaaactgctgctgagactgggcaatgaagtaggtgatgaattttgctgttgttatattctgtgcctcttagaacactgaattcttagcaacagaagctgaaaaatcaacccactggcctagcagtgaggaatggtaaagagaagtgcctatgatgtcagcagacttgagtttataaaagagatgtactacaattaaataaaatacttcaattacaattaatatctttatacaagcttctttgtattttccgaaattgtggaaatgctagtcacatgctttcaaattgctctgcaaaaggattttgccagggattttaaattttacttctagtaataaagtttctttataactttgctgatattggatgctattaatctttttattctttatattttagggaaaagttatttttactgttttaagttgcatttctttgactctagtgaggttaagcaaatcttatgtttaaagcaaatcatctatttgtatttcttgtgtgacttgcttgctctaattttttgcttattttcaatgcagttgcctgtcttttccctacttatttgtaattagtttttctgaatcgtaagtagttatgcattgttggttatatgttttctcagtccgttgattgtcttttaacatttttatggtgcttatcagacacatatttaaatttttatacaattgatgccatcatttttggttttggcttctgggttttctgacccacatgaaagatttataagattaaaaaaatactttttgtattttaaccttacactttattttaaaatattttgttctttaatcaatctggaatttatttttagtatggcacgaggtagtgatctaatgaatatccatttttataatatcataactatactttccccatgaaatgctactttatttacaatcttttttttttttttttttttttgagacagcgtctcgcactgttgcccgggctggagtgcaatggcgcgatctcggctcactgcaacctccacctcccaggttcaagcgattcccctgcctcagtctcctgagtagctgggattacaggcatctgccaccatgcctggctaattttttgtatttttagtagagatggggtttcactatgttggccaggctggtctcgaactcctgacctcatgatccgcctgccttggcctcccaaagtgctgggattacaggcataagccaccacgcttggcttacttttataatattttaagctcccatagacatgtagcatttttgaatattttgtatcagtgggctaactctttattcattagctaatactacctattttaaccttggctttttgttagagattgtggtgagccaagattgcaccactggactccagcgtgggggacagagcaagactccatctcaaaaaaaaaaaaaaaaaagttttcccttactgttatttaaaaaattattggcttctctcattcatcttctttttaaaaattaaaattaattaattaattcattaatttttagagacaggattttgctttatctcccaggctggagtgttgtgctcaaacatagctcattgcagcctccaattcctgggttcaagcagtcctcctgccccagtctccctagcatctaggactacaggcattctccaccatgcccagctaatttttttattttttattttttttggtagaggtagagatgaggtctcactgtggtgccctggctggtctcaaactcctggccccaagtgatcctcctgtctcggcttcccaaagtgctgggattatgatgtgagtcaccatgcccaaccctcattttcttttatataaaatttagaagcagttcgtcaacttccagaaaagtttgtgttggaattttgattaaaaaatgtattttctgttttgcagtgggcagatgtatgcaaacctatcctaaagttcaaggaagctgagaggccgaagaaagaggctgacaaatctagtttctcagaaagaaacctttaacagggatttaggaacagaagccatgtctgggtctcagacagggcaggatgagatggtgagttctttgtgccattacccctgaggcccagggcttatataccataggagaggggtggtttggaagagatgtgtagcgccattgaagtacgagaacatcaagattgtttgacctacaggcaggatttatagtagtaagtacctgcttttatgcaagggacaatgtagagaaactggaactctcagagccctcttggaactggggttaatcagaagccaacctggtgaagtagcatccaaagtgaagttgcttcacccgccacaatttctatttaaaacaacagtatatttcatttatttagattttcttttatgtcattcatattattcttgaatgtttcttcttgggtttattccaagtttgttgctttaggaatagtacagtatcttttttcttttaactttctaactgattattatagacaattagatattctattaaattttgtggtcttgtactagccatatttactctcagatgagtttcagaaatttcttagtttattcccctaatttgttactttatgtagacaattatattatcttcaaagaatcatcacgtcttttcctttctcatatacatatttcattaaaagttttttcctatcttatttaatttgttagcatggctagtaaaatatttatcgattgcagggatggcaggttttctggtgctttgtattatttatttgtttatttttgagacagggtctcactctattacccaggctggagtgcagtaccaggatcacagctcactgcagcctcaacatcctgggctcaggagatcctcccacctcagccccccaagtagcatggactacaggtgtgcaccaccatgcccagtaaattttttattttcgtagagtcagggtctcactatgttgcccaggctgatctccagctcccggcctcgatcaatcttcccacctcagtctcccaaagtgctgagattactggtgtgaaccactgtgcctggaccatatcttttactttaatgggaattttaaaatgttttggcattaaaatggtgctttctataggcttctactatattcccttccaacttttgttaagttaaagaaatgtcctcttattccttttctaagtttctttccttttaaaattgaaatgtgtattgaaatttaccaagtgcttttaagcactattgaaatttgtatatcatttactttgatctgttattgttattctacctgtattctacctgtacaggaatattctacctgtattctacatagaatacataaaataaattctacatattttacttagaatacacagagtaaattctactttgtcataacattttattctcttaataatctgctggattcagtttttcaaatagtctatttgtatgagctcattagtgaaatttgcttatgaagtattaatcacaagttgattgacccaaggcaccttccagtccttgtgtctattcaatctcaattgaggttgttgtgtgctcttctagtctttatagtatttttctcttgcatatgtttctattttcaaacaattactcatgatttctagtcactgatgagactttctcctattttccagggcttgttgggcttatccttgtaatattaaaaatatttggatgggagggtcagcggtcatctgtgttcagtctattatcttgaaccaattccagtatagttgctgctgtatttaagaaaaattttatgcctgttttataactttctgccccattaaattatctttttttggactaatagttttgtattaattgttctgagtgttttagaaagggaatgatattatataaagcaactttaggctcggtgcaatggctcacacctgtaatcccagcactttgagaggccaaggcagggggatcccttgagcccaagactttgagcctaggcaacatagtaagatcctgtctctacaaaaaaatgaacaaaattagctgagtgtgatggcatgcacctgtagtcccagctacttgggaggctgagatgagaggatggcttgagcctgggaggtcaaggctgcagtgagccgagatcacgccactacatccaacctgggtgacagagtgagacactgtctcaaaacaaaacaacaataaaaatttgtatctcttttccaaaaaggatatcttttttttttcctttccatgatcttattttattggctagagatttcagaccatgttgaatgtgtatggggacagagggtatccttattactaaagttaatagggctcaattttgtacatgtatagaatatttgctgctggttttgtagacattttttatctcatttgagttatatctttgttccctttatttctaggttactaagtaatttttaaaaaactatgtattgctgttgaattattatcaaattcctttttgacctttattcagaaggtcttccttcaccccccttgacttattaaaataaatagatttcctaattgagggagatcaccgtcatccttttctccatggttttctttcatcatcaccctattgtctttgcagtgcaggatgaacagcaagaccctgacaagcaaaagggtgtcttcagccagtgaagatggcaaaatggatagacagaagtgtgcttttctagttgtttattttttttgtctttcccatcatgttaaaaaaattttcatcactctccaaaatcccagtccatccccaaataatacaaggccctgcagagagtcagctttctggctagagtgcaaggtacatgctgtagccattggacaaaacgaagccaattgggtaacaggatagaaaccatgaccctggctctttatcgatgaaataaccaggcacagacatcacaggttttctctttgccagttcaaaatgccaaaaagggatgcaggggaagaattaatgaagattctctctgatgtagcttctgtactccctccccatagcgtgtgtttgctttttgagtaggggatttgattctgaaatacaccatacttggcaattttctttaaagcttaaactcttagaactaagtctcaggattttcgatggccatgggcaaatgctttttttgtggatactgtttgatgaatgtgcccagttgacgcctatgctcacaatttccacaaggaacatcctgaacctttctaactaaacacaaggccaatgaattatgtgtgggaaactctctctacctctctctctctcttttttaagtatgtagcagtcatggaagttgagccatctttccattagtgcatgattgcaaatgtctttcttagtatttaactacaggataagacaatggcctaaaaactaggccctagagatgagcctagtaggctagtttcccaaattgtgagagagtattcaggatgttcttgctacccaacagtatattccatggaggtagatctaggaaactctgataagacttccgggctgccacactcaagacctccagcacctttgccacttgaaccagtgaagagtctcacagcctgccctaaccacagctcccttctgagaggaaaagctgctcacagtgagtggtcatagttatggtatttatccccattcctactgcccctattcacacatatacataacaagctaacttaagggtgacccaaccataggctagtgaccttcctccaaatgcttttatttattctattatttttattttagaggcagagtcttggtctgtcacccaggctggagtgtagtggcatgatctcagctcactgcaacctccacctccccggttcaagcaattcttgtgcctcagcctcctgagtagctgggattacaggcatgtgccaccatgccaggctaatttttgtatttttagtagggacagcattttgccatgttggccaggctagcttgaactcctgacctcaagtgatctgcccatctcagccttccaaagtgttgggattacaggcatgagccaccgtacctggacccccaaatgcttttaaacaaatcacattgctctctcagcaaggaagaattggaacactgagagactaagccagttaggtatcacaggtgaagttggggcaggctggatcttaagagaccaagtacaagttaaagttttgagggagaaaagactgagaaagcagaggacagtggatggtaagaaagagaagaaaacagatgtgctgagaaaagcagagaagtcctaacacattaagtggccatggttcctattggttcccaagctccagttctcatgaggcaccaggatgtattacagtttaccgtctttgggaatctatgagattcctatgtattctcataatattaatcctttgtatgtgtcaacttgagtgttcttgcaatcaaaagacctggcctaagatatgggcaatgtgggaaatccacatttaggcaggcagtggaaactttaaaactctgtctttagtgccagccagttacttttaatttgttttcctcatcataggaaaccttatagaattggagtgtgaatttcttggtgcaggatgggaatgcccagagcttgaggatttagggtttactggcagggctgagatctcttcacactcctactcaagaggcatgactatcttccatcacctcaagaaggttttaactaatgctttcaagatgtgagtgattggtaatttacaaatgatgctgggtagactgtctctgacatgtccacttgcacctccagaactctttatatgagcgatactcacttctcagttcatttgctcagtaaacaaaagatcaaaggggaaaaaaaggtaagaattaatagtaggaaatgagcattttagagaaatgtctgaaatcagctgagtgcagaaagagaaagcttgaatgtgatagacatcagctctagaaattttctgaacactctaggattcttatgaacctgcagccatccttcaaggcccaattcatagggtattcttttcttgaattgggaattgaagggtggataggatttagatatgctgacttgagagcagtggcatcccttgtggagaaaatagcatgagtgaagatctggagagggtcgaggccactatgtgtggaaaactaaggacaattcagtttagctgtggggctaagggtacacaaatggaggaagacgcatgttaaaccaaaaaagtaaattgcggcttaacccctgtaatggcctccaggcaggcaaagtgagtatcagagtttcatgagtgagggagggagtgattcattagctgcctttaggaatattaacttggaaacactgtgttgtgaggattagagtgaggaaggagtggacattgggagatctggcgcaagataagaaaataggctgggtgtggtggctcatgcctgtaatcccaacactttagaaggctaaggtgagaggttcccttgagtccaggagtctgaggcgagcctggtcaatgctgtgagacccccatctctacaaataattttttttaattagctgagagtgatggcatgtgcctgaagtcccagctacatgggaggctgaggcgggagaatggcttcagtccaggaagttgaggctgcagtgagctatgttctcaccactgcactccagcctgggtgacaagggaaaccccatttcaatcaataataataataacaataataatgtagttttaataaaaggagaacaggaagagagcagatgaaaaagaaattaaattacagagaaatggctcaagtaggccttgaaaagaagcagtctgtgttacccttggaagttgcctgcttgtgttgttggcaggataatggtacttttaggaaagtggagaatgccagagaaggagaaggaagtgaggaggaggaagaaataggggaggagaactcattcttgaatcagtttaagaagcttcaaagactcaattgatgagtgaacatcagatttaaatacaccctgtctccattagggagatacccagaaagatgcactatgtcatggctaaattaggctgagtttcatgtctgcatgaagagaagtgtattggtctatgtctgtaacatatatatcactaaatttttcaatgtttttgtaatttgtataaaaatctcaaaaaaaaaaacagtctttttttttcccaaggggattaagctatcctatggcgtatagccttgggtttttatttcattgtaataattttctagtcacttaaaaagttcttgcgtatttagaatttattactccaaatttgaaaaatctaaggctttgtgtcttagcacattgcatctctgttaagacattctttccacaaagacattagaaggatctctggaggtgactgatgaaacaataattttgagtggatttagggttttaattactgttttatttaattgtgagtgggcactgtggaaaaaaaatccatcaacaaaggaaacaattgttccaaagaattacatctgcatttattctctgtcaaaaatttctcattaaaaatgtgtttctttaaaagtaactcaaagcagctgatgaaatacaagagcatggaaagtttcaaatcccagtacaaactggattcatccaagatcatttgccagagacttgactccatggtaaagagcttctcaccatttctcacatccattaactgggtttcatacttacgctcagatgctggcagttttatttccataggtggatattttccactcaaacacttccttttcataatacttttgatgtctctagagcattaatactgtttgacttttctctttagtgatgactctgactcatgttttttttactttaagagagtgggtgaagaaagaaagaagccataggcagctctactaaagaggtgaaaatcctaaagaccattccacaatgtctgaaccaccatcaaagactagtgtgtgagaaatgacagttactgagattattcccaaaccattctctagtttttttggaaagatcaggcctgcatgagaggccactggggtaaatcttacaaaaaaataagactgtaggaaaaaatagaactaccatttgatctagctgtccctcttttgggcataaacccagagataatgaaatcaccacctttttaagatatcttcacccccatgttcactgcagaattatttacaatagccaagatatggaaacaacctaagtgtcaatcagtggacaaatggataaagaaactgtggtgtgtatatacaatggaatattattcagccctaaaaaagagcaagatcttgccatttgccacaacatggatgagcgtggaggatattacactaagtgaaataagccagacacagaaatacaaatactgcatgatctcatatgtggaatatgacctcacatgtagaatatgctgtcacatgtggaatctaaaaacaaattcactgttgggccctgtgactcatgcctgtaatcccagcactttgggtggctgaggtgggagaatcacttgagaccagcctgggtaacatagtgagatcctatctctacaaaacaaatttaaaagatagccaggcatgatggcacccacctgtagtcccaactactgaggaggctgaggtgggaggatagcttgagtccaggaggtcgaggctgctgtgagtcatgatcatgtcactacattccagcctgggtgacaaagtgagactctgtctcaaaaaaaataaataaataaagtaaatacattgaaaatatttagagacagagaacaaaacagtgattactgaggcaggggtagagagtgaagacgaaatggggacatgtgggtcagaggatagaaagtggtagatatgtaggatgaacgagtctagaaatctcatctacaacatgaagatcttaggtaattaaattgtgctgtgtatagaattcactgtaaatgagtagattttagctgctcttgccatgggtaactatgtgaaatgacgactatgttaatttgttttcactataataacctttttactatctctgtatatcccttaacatgttatataccttaaatatacataaaaacgtttatttttttaaaaagattacagaaaaacatctctttgaagctggcactgctgatgaaaactaaagcaatagatggagaaaagaggacgataaagaaaatttgggctgatattctccagaaaaggaaagggtggccaccttgtcaatggatttgttgagcacccattatgtgtgggaagggattaccaaacgctacagaaatctctgtcttgaggtcatgtaacagtctattgagggaacaaggcacatatataccaaaatgatttaaatagcaaggtaagagtagcataataattctcagcagctactgagcgttgtatagacattgcttatttaatacttaccaaatcagcccatgaagtagatgggtttgttaaaatgtatttgctgactggcaacagaaaagccaaaaaaatatatactggcttaaacaagtaaggaggttatttatatcatgctacaaaaagcctagagtttgttgccctggttaggaccacctgggacacagtctcctccatatttctgctctacagcccttagctccacagtcatagttgctgcccattcaagcatcacatctgtgtgtaaagcaggatgaaggatggtgtaacgggcgtggggcacttatataagaaaaggaatgttttcccagaaattcaagaatacttcctcttatatactattagccagaacaatgtcagtaggctaccatcagctttaaggaagccagttgcttgagcattttagctgggcacattgttaccctgaacaaaactggggctctataagaaggaaaaatgaggagagaacttacattgggaacataaatagcagtgtctgccatggtgggttgactatgtcattttacagataataaactgaggctcaaagaggttaaatggtttgctcaatttatcatacaaccagcaaatagcagagccagggttaaaacccagatgtgagtgaatccaaagtttttactcgtaactcccattcattactgtcatgtggcgcttcaaatgaatgatataaataacttgatggtaaatgcagggtgggagtagatcaatacgattttggtaggtagaaaatagggagtaaaatcatgcagagagaaagatttttcctactgttggaggcctttgggggacaggaaaaagtccaaattgattatcagagagttattgttagggaagaatgggaagaaagctcagaaagaagtgctgggacaccaggcttccttgatagctcccaagtaacaagtccaaaatggaatttctgatttctctgttccctaatccactttattctccatcttttcccatctcagtaaaattcacatttatatgcccagctggttaaacagaaaatctgagggttgacattcatccttctgttgccctcactctcacatctgcaagttctgaagtatttacctccaaaatatctctcactatgtcctttctgtcactatctctgccccttgctcatccagcttgccaccagcgtgtgcttgagaatggaaacagcctcctcctaatgggtctgcttgcttcttctcttgtctcctttagccagttctccacttggcaatcttgaatgaactttaaacattgtaagccagatcatatgacagcatccacttaaaaccctcctgtggtttttgttgcacttggaaaggaccccaactatgtctttggcttagaccccagctttgtttgtgaccctgcacagtctagtacttccttacctttccaatcccatcttgcaccgcattcacctttgctcactcttgggctccaattacagtagcttctttgcaattgttgaaatgcttcttgccttgcccaagatccttctttatggtttggagtactttacccctggtcaactcctgtttcttcatatttatgcttaaacatcatctcctcaggcggggttccccacgtgctctctctaaatccagtccctcttgttcttctctatcagaaacttaatgatttcattttttttcacattcagattactttcctacatatgtaattatacctttatttgttatttgtttacctttttctggtctgtctcccctgccccctattaagaacaatgagggcagaagctgtatttgttttgctgctgctatatatctggtaacacagtgcttggcacagagtaggtgctcaataaatgtttgaatgaatgaatgagtgaatgaataaacaactgacaagattgacttggcaaagtctcaaatgccagtagaatgtgttgcacacacaattagaaataaagcttgtgggccgggcgcggtggctcactcctgtagtcccagcactttgggaggctgaggcgggaggatcatgaggtcaggagatcgagaccatcctggctaacacggcgaaaccctgtctctactgaaaatacaaaaaattagctgggcgtggtggtgggcacctgtagtcccagctactagggaggctgaggcaggagaatggtgtgaacctgggaagtggagcttgcagtgagcctagattgcgccactgcactccagactgggcgacagagccagactccgtctcaaaaaaaaaaaaaaaaaaaaaggaaataaagcttgtggccgggcacggtggctcacgcctgtaatcccagcactttgggaagctgaggcaggcagatcacctgaggtcaggagttcgagaccagcctggccaacatggtgaaacctcatctctactaaaaatacaaaaattagctgggcgtggtggcgggcgcctgtaatcccagctacttggcaggctgaggcaggagaatcacttgaacctgggagacggaggttgcagtgagccgagatagtgccattgcactacagccttggggacaagagcaagactttgtctcaaaaacaaaacaaaaacaaaaacaaaaacaaacaaacaacaacaacaacaaaaaatcacaaaagaaataaagcttgttaaagcaatgtttgacaagaaggattcattttatttacgagaatcaaatccaaatggcaggtgggggatgtctctatagcagttaccaggatggtctctgataattttatggaaacaataagaactacatgtatttaattctattttaatttaaccattctatgttcagggggtagaattttgatgatgacaactacttcctcttccctggggcactgttgagaaacattgcccagtgtggccctggggagcagtttctgttctggcctgatctggattcctcttctcccagcttctgctgacctccttctgactctgatgctggtccttaaccgacacttgtccttaacctacgctgcctgctcaggaatcagtcacttccttctttcagggtctttattacttactatttgcggatgattcttggtgtctgaaatgtgattgctcaaatttcactttacataagtctgcaccagttgatatttagaaaagttttacttccctctaatatatgcgcaaaaaactgcctgcttgttcaacatctatacctgagttctttgcctcagtaataacaaggatgatatctacagcaatagtaacatagcttctactatttagtacttactatgtaaaaggcattgtgctactcctttgagtaattaacttaatattttccacaggtgaagaagctgaggtatacagcatgtattaaatagagtgtgataactactgtaacacacaaagccttattttattgctcatgtccatgtaccttagtggtcaagggtgtctactccacatagttattcacggattcaggctcctttcatatgggtctcagaatcctcccttaggtcctctgaatctggtggcactgacaagacaaaggagagaggaagtggagatcatacaaaagggtttagaacccaggcctagaagtagtgtattccttctgctcaaattttattggccaggaatcaattacatgcctttgttgaaatgcaagggggctgggaaatataatcttcttatacacctaggagaagaggaaacaattttggtgagtatctagccagtctctgccacacagaaattaaacaacttgtcatacaataaataagtgcagatctgggactcaaatacatattggttggactagaagcctaagctgttaggcacatgtctatcctctctttacctgtatatgtacattttttaatataaaaacttttatatatatatgaaaatacatttttaaagactgtgctgcagccacatggtgaaagcaagtttatagtctgctcttcgtcaggaagactcactacctgattaagggccaggctgaaaatgtcttctttgatgagacagaaaaatgcatgctgtgacacttcctgtgtgaagccatataaccttccttttcatgtcagcagctcagggatcctgttcctgcttaacctattccagccagagatcatgagatcatattagactaaggactttggaccttatcctgtggccagcctgctaatgaaactcttaactggatgcatttaaaatgcaagtgatagtctctctttgctgtatggggagggccttacaccagtgtaatgggtataactttgttctataagttcaggtgtgtaaaaaatgtactttacattttcctttaactcaaattaccatattttattaattccaatacatgcctttttgtatgctaacatctctgaaatctggatctaataattgatggcatgtttgaattgctatttgctgggtggcagtgctgatttatttgccattgtctgtatgtgtgtgaacatggtcataggtatttagatattgttacctctttagttgaataatatgcactgttggtattacccaggcagagtttagttgctgtttgcaatattttcaaaaagattatcctgagtttcagcaatgaaatgaaaacttataatgaacagaaaggctcagaaacagtagtggagtgtaaatatagtaaagcaaaaaaaaattataagaatcacttcaaagctacagtgtcatacagagtaagagaattaaattactataagtatacgaaactgcgatacagagttatgttaaaaagcattgcatgttagtacatgccaagcaagagcgcactcacattaaacctttttgttttttttgtttttttttttctttgagacggagtctccctctgtcgcccaggctggagtgcagtggcacaatctcagctcactggaagctccgcttcccgggttcacgccattctcctgcctcagcctcctgagtagctgggactacaggcgcccgccaccgcacctggctaattttttgtatttttagtagagacggggtttcaccgtggtctcgatctcctgacctcatgatccgcctgccttggcctcccaaagtgctgggattacaggcatgagccactgcgcctggctcacattaaacctttaacaatgggtgacaacatcttggaagaaaacctggagtcaagagtgaggatactagtaagaaatgtttcatcaccaacagagaaaaatagtgaggagaaaaatataaacagtgatgtggaagagttagactctgaatgaagagatatgtttaggaatttcttaatacatttattttcttttttatgtgtacaagagtgacatgtaataaaagtctacgtcccaacaagtcttaaagggcttctccagcaagtataaaataaaaatttgaaacaaagagaaagcattgtttcatagattaattgggggcatctttctttcttggtggcacacaaattaatgatgtattttacaatcgatggcattttagtatcaatgaaatagctaacctctcatttgcactcccattcctttgagtattggaaattaaatttcagtcagttaagcaccacctcttcccatgattaccttgcatttcctgggggcttacgtatggaagcccctgagatgaccatcattcggcctggttcctggtcctcaggcaacagagatcattgctagggacatttcgttctcatctcagagctctttcaaagctggctggctctttctgctacttctgtgtctctcttggatgcagttccttggacacaggaacttactaaggctgataaggccctaggcttatcagtgggcccttgggagcataaaaggtattctgtccctccatgtcctgctgggtggctgggtagctgagtactggtagaattcactcctcgtgagtgctcttaggcatacaggaatccagcctctcttctgcatcattttggcatggggaaacttaattgctttgggctgcttagatctcacatggccacattttctcctatgacatcttgcagcctccatgactttacctggagaaaggggcacacatatcatcaagcctgcatggggtttgaggcatttcccttcccattcccacaaggtcagtgggttgggccaggctgcaggacccactgtcggggatccaccggtgtccagctctcttagcttgctttccacgtctccctttcatcctagtctgggcaatgttttctaatatggagggtcagctagactttctctcaatttatgtcccaaattcttctactcctcactagctttgggctctaaaacccaggccaagaacagaattgtggttttcctttctaagacagggtctcattttgagatagggtcttaggttttcctttctttttgaacaagtggttctgaatgcacagctcactgaatggaagaaaggtctgagtgaaaagaaacatgataaaaccacactgaggagcatttcaaaatactttcctaatgcaaattcttacagtgcctactctttcactcttattttaacatgttctttttggtcagtttcttacattgcttgttttctatatcagcaacctggtggctgatttcaatgatccatcaaggctccttccatttattttccctaatcacctcagtaaccagggtgaaggtatagccattctcttccgcctcttctctctttttttttttgagatggagtttcactcttgttgcccaggctggagtgcaatggcgtgaccttggctcacggcaacctctgcctcccaggttcaagcagttctcctgcctcagctcccgagtagctgggattacaggcatgcaccaccatgcccagctaattttgtatttttagtagagacggggtttctccatgttggtcgggctggtctcgagctcccgacctcaggtgatccacccgcctcggcctcccaaagtgctgggattataggaatgagccactgtgcccagcccctcctcctctttttatttttataatataaggtttataatttctatttcattgaaagaaatgagtaacatacagactagtagaagaaagggaaaaaaatacataaaacttcattaagacatcccctggttggtgacattctgttgtttttccttctagttattttttaatgcttacttggcgtgtgcgtgtgtgtgtgtgcgattagcattacatcagacatagaactgtatatccggtattgttcattcaacactatgactatttttccttattattataaaatcttcagaaacatcagtgagttgacgcagcagagtttactcaaaccatttgcctagtatggagcatttagcttattctcactgttgtgagaatatttatacataaataatagcattatgattgatatccttgtgcatgaagtttttcctacatttctgcttattttcttgagttagtctcccagaattgggattactagaaagactaccgttataaaaacatgctatttccctggacttcatgcagtatttcctctccaaatacgaaaatcttttacctggataccctatatcacaggctgtacttgatgtttccagtggggaaaaaaatccaactgctgctgatgcaagaacattgtatatcctcacaaaggcaagactgatgatacaaaaaatataaagccaaaatctttgtctgttctttccccctttatcgatagttataataacttctctgagagcagtatatactatttgagtggaagatttccacaggcttctttcgttcacctccagcttccttagatcttgacggctttttctgatctcgtaacaataatttgccatttatccataggaggagatgttctgtacctacaagtagaaagtctgactcaaatagttacttctaaagttatattattttaaaatctaagctgaagttccatggtggatttaactttgaagaaacacccaaagccaatccattcaaagcattgtgttctccaagcagctactgtaggtggctgagctcatactccaacaatgtgtcatcactccagatgtcttaggcctcctcttctgaaactactgtcaaaatctctggcacgtttttgaatatcctcaatgaagaaaaatcttaatcttttttgaggaagaattggatcttttgaaactttcagtagttttcagaatctaactgagtggacaatgagatgagtgggaaaatgggcaagatttaaaaaaataaatcaccacagtactattacaaaaccatgaggctgattttcttgggtgactagtaaatagcacagaatatgaaaacaattctcccagagtaaggagtcagattttaagctgcagtagatcattaggatatgaacattaaggaacctgatggccaggttgagacacttatactctgaagtgtatgtgtatatatttaatttaggctcattccttatgagtgatgccatttaaatgaaaacatgtgcatatttttaaagaaaactcagcttgagataaagaaataaaacaaaatctatgtattgacattcatgggcttaattaattataacagtccagggaggactctgcctcttttaaaacaatgtcattttattcatttaaaataagtactacatactttttatacagaatttggaaaatccagaaatttctttactcagagctattccctcataatatatatgtttttaatatacttaattttttagagcagttttaggttcacggcaaaattgagcaggtcagagagttctcatatacccacttccctaacacgtgcagatcctcccccattatcaacatttcctgccagagtagacatttgttacaactgatgaacctgcatcaagataacattatcatccaaagtccatagtttacagtggggttcattcttgtatatagcatgagtttggacaaatgtataatgacatgtatccaccaaagtatgacatagaatagtttcattgcccgccaaatctaccacgctccatctcttcattatattttgatctaaatataccttagattgggttctctggaaacagactctgagaattgcctgctgaatgcttactgggagcatgctttcaggagatgctccttgtaagaaagtaaggaaggaccgcgctgtgcagaggagaatctgactccagatgcagttgcaactgagactcagccaatcatggagggagctgtggagctgggacggccctttagaattgacccaaagtaaagtaactggcccggcttttgtatccttgcatcagtgagtcattggccccctagaggggctaattctggatgattctattttttggggccaaggacaattcccaataggggatgcagctgtgtgctatcagcagtgatattcccagcagctggagagggacaggtacttcacaaaggggagttgggcaaagactgcattcggtatccactgcaatgtcatgttaaaattgggatcatacagtccatgcaacttctccacctactttttcactcaacactatttgatgaatttttcccattttgttaacctctctttgaaatcaacattttaaatatctgcttattttatcatatgaaagtatcatttatttaactgttctcttattgttgaacaattaatttttgacacattttcactataataaataatataatgaacatctttatatctttgtaatatacatgatactaataaaaataaactgtatttaattgagaatgcttactattgactatgtcaggccaatatctttcttgccttccttgtggagtttttacgagaaataaatgagaggctgggtgcggtgggtcacgcctttaatcccagcactttgggagaccaaggcaggcagatcacttaaggtcaggagttcaaggccagcctggccaacatggtgaaacatggtctctactaaaatacaaatatgagcagagcatggtggtgtgtgcctgtaatcctagctactcaggaggctgaggcgtgagaacctcttgaacctgcgagtggaggttgcagtgagccaagattgcaccagtgctctccagcctggttgaaagagagagactcggtctcaaaaaaaaaaaaagagagaaaataaatgtaaattatgttgcacttttaaactcatttgatgttaactttgtgatgcagagaccattgtcatctccatttttcagatgaggaaacttaggcacagaggttaagtagatcatctaagtgagcattagaatagtacaggcactataaatccagagtttgagcaaaacatgatactatttccctcatcctgcttttctggtgcttttcctaagtttataaccttagaaggagaattccatagtcaagggcttgacttactttaaagctcatgataagaattgccaggttatttcccagaagtaatgagaacttccaccagcagagtatgagggttttatttctccatagtcaacaacaaagaacccaaattcttaattagaaccatgataaagaataagtaatctattttcttgtcttccctcaggcattatgaacattcattgttcttaagcaggcctttccctggtttgttagcatgctcaattatttcaagatcatcttctaagtgttcactaaaatggatgacatacatttcagagaagaattttttgtttgtggaacgaatgcatgaatgaggacaaggagaggcctggatcacaactttgtactggaatatcaggagttgtgtaaagcaaggaagcggagactctgcagaacaaagccccttcaagacaaggaagtgatttgtgacaattgaccatttttcacatactcttcattggggtcttttaaaatctcagttgaattccttatgtaataagcactcattgcagtccctttacctgccagactctatcatgtgcttgaaaacattgatgtttaattctggaaggaattcagggtcatgtgatcccatcccttatgacacagaggaggagcttcaagccagtgccacctcgttggggcctttccctctcctgggggtggactgtaggagatgtggggaggggaggatggttctgttttcctccattcaaggtcagaggaactcttcagaaatgtcttagaaggcagtcagagttattttgtattattttagcattgacttagactgatcttaccctcacataactccatagttagttcatttctgaattctgagagatttctttggaaacccacagtttttccctcacttctaagctttggcaacctctttaagttcatttacttgccattccctctaccatataggttgttgtgaggctgaaatgaacccaaagtatttaaaattcttacagtaatacttacaaacagtaaacaatttataaatattgactttggtttcctcccttcttctctgctccccattttcctccttcccagaatggtgtatagctgtgagatatttctgaacctcaacttcctcatctaaaaatcataaattatactttactatatattcaccacacagggttttagtggggatcaaatgaggtaatccatctaaagcaactttcacagcacctggcgcagagcgggcagtcaataatttgtagctgggattactttaaaacctgttaatgtgctttaagtcagttatcgaattttctgcgctgtctaaaagaatgaatcatatgcacttgattaattttcagccctgttgaatttatttcttttctgctcagctttcctgaggtacaattgacaaattaaaattgtgtatatttaaggtgtactatgtgatgttttgatatacagtagttccccctaattcatggtttttctttgcatggtttcagttactcacagtcaactgaggtctgaaaatcagtgaatatagtacaataaaatattttgagaaagagcgagagagaccaccttcatataactttcattatagtatattgttataattgtttatttttttgctagttttcattgttactatcttacagtgcctagtttataagttaaactttatcatagatatgtatgtgcaggacaaaacatagtacatgtagggctaagtattatctgtggtttgaggcacccactggagatcttggaacatattccccttggataaggggggacaattatatgcataggtttggagtgatttcacaattaacatatctgtcacctcatacagttattttttttttatgattagaacacttaagacctgctctcttggcaagtttcaagcatatagtctagtattaactgtagttaccaggttatatattagatctatagaacttacatcttttatgactgaaatttggtaccctttgaccaaaatctcctccctgtattgtatcctgcatcccctgaccacctttctacgctctgtttctatgagtttgatttgtttagaattcatatgtaagtgatatcatgcattgtttgtctttctgtgtctggcttactttactctgcataatgtcctctgggttcatccatgttgtctcaaatggtagaattttccttgttttttcagttagctctgttgaatttagataaagtataaagttgatatagaacgagcataacatagatttcatggatgaggttaatttcagccctgttatcttcaatttctgtgtttttctcatctctttttaaaattttttttctttccctttctcttagtctctattgttttctattcatgataactgaagttcccttttcctatggttcagtttgagtagtaacttgtgccagtgataagcaactgaaatgactgatgccaggccattggcctcttggttgctgaatatgtcagattcattctcctggcatctggacactgctggaccctcttttcctgggcccgaggaacagcattccctctttttttttccctgtctctcttctctgtaaaaaggcccctcaggggcttttcctcttcctttactactgctaagttcagaagtgccctgaatttcctgtgcaactgtcttctctcctcacctcctactctttctgggtaagcttctctcttcctgtgagggcttcatctgtattgtgttaagccccaaatctgtgcctctgacctagacttctcagcaatgtttagtgagaggacatctcatcttgggtatgccactggccagtccaactcaatgggtagagaatgaacccatcatcgttttcccccaaaccagctctacaactccagcccacaaccactctgcaaccactagtgcaaaggttggtagttcagaggacacaatagagggaataaatgatgtattttgacttttccaactagactctcactttaaaaatgtcatcttctctataaatactgattcaacccataattcttttctctgcacctatctatgttatattatagaattgattttattctattgctgtgcttcatttatgtttctttccttttagaccaggggtcagtagaattttttggtaaagggccagagagtaaatattttaggctttacaggccatatggtctctgttgcaactactcaactctgcggttttagtgtgaaatcagccatagacaaaacaaatggatgagcgtggctgtgttccaataaaactttatttactgaaacaggcagtgggctggatctggcccacaagccaagagtttaccgacccctggtctagactgtggactcctagagagttacttcataagaatttagagtttagagagccttttacctgccagatgatgctagaggtctgagaatctagagacaaatgctcttcagttcctgacctcagggatctcccatggagaccaagcgtgtgctgtggttgaggtgcagattagtctcctagggctgtcctaacaaagtgtcacaactgggaggctctaaataatagaaatgtattcctcacagctctggaggctagatgtctgaaatcagggtgatggcagagttgggtccttctgggtgctgtgagggtgagtcgggcccatgcctctcttccagcttctcgtggctccttgactttgtagatgcatcactccaatcctctacctatacctggagttctccatgtgtcgttcctttgtacatctgtctctgtgtccaaattttctttctttctttcttcctttttttttttttttttgagaaggagtcttgctgtgttgctcaggctggagtgcagtggcacaatcttggctcactgcagcctctgctccctgggttcaaggaattctcctgcctcatcctccagagcagctgggattacacatgtgtgccaccatgcccagctaatttttgtatttttagtagaaataaggtttcaccatgttggccaggctggtctcgaactcctgacttcaagtgatccgcccgctttggggcctcccaaagtgctgggattacaggcgtgtgccaccacatctggcaaattttttatttttagtagagacggggtttcaccctgttggccaagctggtctcgaactcctgacttcaagtgatttgccctccgtggcctcccaaagtgctggaattacaggcgtgagccactgtgcttggcctccaagttttcttattttatcaggacactagtcagattagggaccaccctaatgacctcattttaacttgattacttctgtaatctgtaagattctgtttccaaataaggtcacacacaaagagtcaggacttcacaatatcatctttgagggacacagttcaatccataataaggtgtatatattaatatttaccatttgtataccaagagaactgaggtgaggaggattcatcctgctaaacaatgggggagaagaaaacggagggcacaaaaaccaacacaacatttggcctggatggatgactaatatcttgctagactacagaaataggaaaggaaattccaggttgagcaaacaacttgagcaaatgcaggagggcaggatcataagaacaagaaatgtcttttgaataattaccctggtacagctgcaaaatggtgaggttggtagaaggggctcaagttgattctagaaagataagctggggcaagaccaaatgtgtgtaggcttcaagagctgcttgcatgatgtttgttgactgaatgaagtatcgaagtcgaaaatgggaacagtggttgtgacaaattcttggctacgaaatccctttcattcagtctctgggggctaattgttgcaagtacttgtcagcgtctggaccactatcctgcaatctctttcaccagtgcacttgggttcacagctccctcgtaatttttatgcttccttatgtgttagaagaatgcaatgacagtataactgaaggtctagcccataagcaaatattctctgatggaaatatgcaatatgtttgtcttttggtaataataatagctaacatttgttaaatgtttactctgaaccagccactgttataagcatcttatgtattaactcatttaatccacatgctcctgcatgagattctagtatctccacttaatataccaagtaactgagcttcagaatggtgaactggccaatgtgacccagttggtaaataactattctctaatcattagattatatgcttacttctccctttggccttcctgtcccctctctcctgccatacttgtcttcccatggcccctcttgggtcattcagtttgcttttgttcacctccaatcatccatcaattagtgtctgatgttcagattcttctctgtctcttacttcccgttttctcccctattcttatgcttttccccatttcttggtctttccttcactgtccctgtattggcttattagtttttcctacttctggtgtcagcaatagatccagttattttaaaggacctttcctttttcttaatcctcatttctaaattcttaccagctgcatataaaaacatagccccagccaggtgcggtggctcacacctgtaatcccagcactttgggaggcctaggcaggaggatcacgaggtcaggagttcaggaccagcctggccagcatggtgaaaccccgtctctactaaaaatacaaaaaattagccaggcatggtggcgggtgcctgtaatcccagctactcaggaggctgaggcaggagaattgcttgaatccgagaggcggagtttgcagtgaaccaaggtcgtgccactgcactccagcctgggcaacagagcgagactccatctcaaaaaacaaacaaacaagcaaaacaaacaaacaaaacagcccctgcagacctcatagctaacacaatccctggttttggagaggtggcggatagtcaatgggctgcatatttcaacgtaaaaataagaaatgtcattgtagccatgtaagtctcattaaagaggattatggaaatgctgacaataataaatttgtaagacacgtaagagtgtataaaatactgccgcatcttgtgctagtagcctaatttctggattactgtttttctgacattttacacaaggcttcattttacctagttcagtatttaagattgagatttttttcctaaatgtgtcatttctgattccatcgaaggagtaagtttagagaaacctcatggctaatcatgcaacagtagcttgccggaataaaggccatgacgttttggaattttagaggagtgagtcttgagaccaactctaggatggtggtgagagggaggaggggtggacaatggggccattttcaaaatcattacactaggttaagttagatttttcctataaagcctccctgaggtgcccttgtgtttttttatctggcaactttcttggatagaaaataaacagaggacttttggctcctgttcaccactgtacctacagaaagcaacgttttggaacttgcaagcagcttatgtgtgcatgagtgtgcgtgcaggaattttctggagaggcatgaggcactactttaattcccatggatgctgtttgttccccagaacggaaaatgttctatttttggccacaagatatttctgagaaaaaaaaaagttaaacaaagcatggcgacaagctcgttcgtgtcgttgtctgagtttcaagaagagtttggtgcgtttcagggaagaacttcttcatggaggcaaggggttggaagtgataagagaaactctttaacttggaatcctgagataggacttgggtttctgggcagaggttgcacaggtgggtgggtcctggctgtgaaggctgcagcctggcctttgattgggggtggcaggttgacaggtgcagaaaaaaattctgttgcacctgaaaaaggtaaacacttgaagataggtattctctgcctggctgcttagaatgaacttatcttgggctacaacctaatatttcccccaaagcaagaaagccctgtttgcatccctgccttagcattcctgttggccacaagcctttgtggggaaggacttctaggggcaggtttccagcagcctctgatctccagataacttgaccgggccagtcacatagtgaatgaaatcattttgggcccttcccccatcagacacttttccaggaaatagctttttgctgccatgacctcttttgctgctgtttgatatccttgatatgaaaaatgtgaatggagacgagcaccccattaaccagcagctcttaggcagcattgcttgttggaggtatcttttcacagaggtgagccggcagcgccctgggcattatgggagcatcctgaaggtacggggcctcgtgctgcagccattggagtgactggcaagagtgatcacagaaactgtaaagccctaagcccctggaaatggagctgcgccctgcggctctgattaaggcttgtggagagggagctgtgtaattggataccctgaagcaaacctcgagcagaatcctgtaaggcagcttgggattttctctccccaatgtgctgttgaaacatccgtgaattccagttggtggttgttttcatctgcttcaagcctagcccttgggtacagatgcagccgtgtttctgggtaatgtttcattcttggtaggaagggctgtttccttctcatgaagtgattcgatatctttggagttacgaaatgaagtgctggtgagacctgttgttacttgttgttccttaggcagagcgtttctgaggagccctgttcttgaaagcagcactgaattgacgccttgcgagcttgggagttttcttcttggttaacagtcttttgaaacatgtacttgggattcaggaacttgcattgcacgggttcagaaatgtgtctgtcccgcatgacctccgttacttggaagcagctgggtatcttgtgcctttatcctcatgtattcaacaaatatgtatcaggtgcctactatgtgccaggcactagggcaattaccaggcagtcttgctgatgggggagacagaccatacataaatatcttcccatgctggagagtactaagaacagagccagagagagaatagtggtagatatatttctggcaagggtgggcaaggatgttctttctggggtgtgtgtgtgtgaaatttaaggtaatatcaaaagaagccagtaatgtgaagaaagggggatgggaatgagactttcgggtagaagaaacagcaagtgggcaaaggccctgaggtgagagagctacacctgcctgaggagcctaatagcacctgtgaagctggagcacagaggaaagatgagaaacccctgagatgagtttggagaagtagccatggggctggatcacatagtgccctgtgggccaagaaaggagtgtgaatgttaacctaagagtgtcggagggcctctggagggcttgaagcagaggcgtgacatgatcttcctacagtttggaaagaacagtcgctgctgtgtggagactggatggggttggaggcaagagtggatgctttagaaggctcttcccaatgtccaggcaggagctgacagtggtttaaccctgggccagaggggtggggtgggatggcagcagctccttcctatctatgttcattctggtctccttccatgtattgtccttctcaccattgttttctgggggaaaagctggccttcttttacaagagcttcatggtggactgctactttatttatttatttattatgaaacagagtctcgctctgttgcccaggctggagtgtagtggtgtaatctcggctcaatgcaacctccgccttccgggttccagcaattctcgtgcctcagcctctcgagtagctggaattacaggcacgcgccattatgccaggttaatttttgtatttttagtagagacagggttttgccatgttggccaggctggtcttgaactcctgacctcatgtgatctacccacctcggcttcccaaagtgctgggattacaagcatgagccaccatgccccaccaggactggtactttagactcttccaaagttatttaagtaaattgatccatgtgattatctcagtaatcctgtgagggatacagggagcttaggatattgtccttctgtgacagataagcacgagggaggttctggaggttatagagagttcctagcagagccaacttcctgcacacccagcccaggcctctctgctgctccatgggacctaacctgtagacttttggttttgtactgtcactgtggattatgacttttatttctaaaaaaaaattgttaaaaaggtaaaatctgattcagggaaatacaaaagaaacacccttttttttttttttttttttgagccagagcctctttctctcacctgggctggagtgcaatggtgtgatcatggctcaatgtagcctcgacctcctgggctccagtgatcctcccatctcagcctcccaagtagctaggactaaaagcctgtgccaccaaagattttatttaattcattcattaatgagggaaccagtaagatggcatatcctgttcaaagactaagaagtgaggatatttataggcaatttaataaaaaaattgttaggataagattactgggttagatataaagtggttaatgtccaacaggccacaaatctttgaggttatatgttccagcagacagaaatgatcagtgtctctactggacaaaaatatacaagataatagataaattcactaagtcagagaccttaagtcactggcaagcaatgaaatgaactaagtatattctcctgggaaattctctggaggacttggaaaggtgtgccactcaccatttttgccttatttccaagttttagctaatttttatgaccccgttactcagagcagcgattcccttggtataatgcctttaagatgatgtttatggaacacctggggattgaggtcaaaaaccaatatggaatggatacattaaaatgcaactcaaactcccccagaatgagttgggactcagtcatttatcagacatctattgagtcctgctcatgggtatgcagagccctgtgctaggctgtgggagcacaaagcttaatacaaaacagttcctgccctatggacctcatagtctagacagggaggcagacacgtaaacggacacattccaattcatcgtgataaaagccaagcagagatgtggggattgtgtgggcgctgggaaagagagcggtgccctcaccctgagagagccaggggcacttcacagagaagttttggtttgagggatgggcaaagggttgccaagttgagaaggggtgtcacagggagggccatttacgtgggatgtcaatgaccaccctgataaatagcatggatgtgagtaaagagatttacatttttggtatggcagattttaaaatttatcctcaattctcacagctagtcttagaaagctgaggttctggggggtggggagggaatgggagtggaacagggaaggagaagttggagtctcttgggcaagcttgcaaaattttcttcaaatattaggtcaaattctctataaaaaccctatttaaaagtttttgaaagactttgaagtcccaaagaagcaggaagttaattagagtggctttgatatcttagggtatgttttaacagctgcttaagacagtttaaacaataagaacttatgtggtttgggatgcgtctgtgatagtcagccctggccagagtgtaatatcattgcatctgagagttaacagcagttggctttaattttagaaagagttcaagccaaaaagttctctaaaacccaagagaggaacttctaaagaggaagattgctcttgaagaatgtgtttgggggtcaaagatgaattgagtagggaacaaatgatcttaactttgtcctcgcaggagcacagaacatgcccttttctgagcaattctcttaagttgtgtttaaccagggacatttgttggcagccgccatttgcaaaggggtccaaatgaggtgaattaacatctgtaaggaacacttgaataacacaaagggtgtccaaccaatttacatttcctgggaattgtcattgtgcttgaagtagtttgtttccttcctcaataccctcagccttcttcaatatttaagacgtttttgacatactgtttcttagcctcttcccctggttggatctcctctatgctggagaagaacatgttgagaaatactatgatgaacagtaaggatctgcctggggaacgggatttcaagagacgatgggaaggcttgctctggtggccctatgttgctgctgctgctagggtgctgatgacggccatgatgattgtggtggtggtgggtagttgatagtgatgataatgatgataatgatgttagctaacatttgaggctaatatttatatgataggcactgtgctgagcattttatactcattctcatgtggtaggtatatttcctccattttacagatgtggaaactgaggttcagagagtgccagtgacttgtccatgcgtccttccatccatcttatatttggcttccattgagtttcctacttctccacaatttacacagtagtatattgcatcgtctaccttcatatgcaaaaatagactaaaaacataaaagtggtttgtaataataccacatgttctcacttatacataggaactgaacagtggatactcatgaacataaagatggcagcaataggcactggggactgctagaggaaggagggcagggattgaaacctgttgggcactatgctcactaacggggtgacaggatcattcataccccaacctcagcatcatgcaatgtacccatgtaacaaacctgtacatgtaccttctgagtgaatctaaagtaaaagtggaaattatgtttttataaaagtggatgtagagaggtacttttggtaatgggccaacgactggctgacagatgactatattattccattcaagagagacaaatctattttccaaaaatacttccttgggaatgtcatgccagtcttccaaggatttcccattttccacaaaataaacatgaaattcttctgcctggaccatgcgtcctggccactctggtgggatatgagtctggggcctaattgagtccttgcttgctgctgcagttggggagtgtcttgtgaaggttactgtttgtttctttaaaaagtgccatcagcacatcttttctgaagaaaagcttgggtttattaataaaatgaaatgaaaactacacaagaccacattttggcagcacacacactcacgctgaatggactgagaaaagattggcatgggtccttcctcaaaggtaatgtgactgtttttaaaagtctatctttggtagtagccatgtgaagaactttaaagtagttagctttgtgagtagggtgcatttgtaaatggggaaattcataaaatgtccatgcatagacaattcactcccacaattagtgaagttttcttgataaagtgttgacctcaaactacttctctactttttttttttttgcaattccttccttctttcttttcttttcctttcctttccttttttttctttccctttccctttctcttcccctttccttttcctttctctgttcttttctcttttttttccctcctctatagacattataaggtgagtgaatgggctgctcaagttcattgagggaaagggtataaaagatgcataaggaaagtttatatagaaaacataaagggagtcatccttcttaaaggagtaacatttcccatataaaggagagggctatgactaggtgttctccagctcaatgtctgccataaaccaggggcatgaggtacaaaaataagggagactcttaatttggcagcttctcttttgtcctgtgcttactggagtttttgcctatttctcaggaagccttcagtgttcattgtgtgggggatgttctttgaggtccctgtctcctctgattttacatagtgtggtaggttctgattctttctttgtctgatttactgggataggcttttctcctgacctgtgacgcacaaatttgggtggaaaattttgtctaaagtctacacgttactctggaaaacagagcttggttcttctttccttttagctttaaatttggctttatcttgcttttattggtccttgaagttctaataacctataggtagaagatattcatagtatgacatcacttcatcaaaagcagcctgaattccatgcactgtagtaagccctctgtaattcataacctatcctatgtttcttgcttgagggattacatcagcaatgacatgttaggaatcagctagtgggatgacttgggtagggactgctgctgttgcttcagaaagctaaaaggaatgggctcttgagtgtgcaaatggatgcatttcattactaccattttatttaagaattctggtgtttccagattttcaacaggtattaatctttgaggatgagaaatcaaaactcccaggaattcttaggaattcctcaaatcctaagttattcttaaaatatttcaacattctttgtgttcctttcttattatgatggacatctaagaaaaatgtatttaataagttggaaacattaattttagtagtacatgttgagtatcccttatttgaaatgcttgggaccagaagtgttttttcagattttggaatatttgcattatacttactggttgggcacctcaaatccaaaaatctgaaagccaaaatgctccagtgagcattttctttgagtgtcatgtaggctcttaagtagtttcagattttggagcatttcagagtttggatttttggatttgggatgctcatcctgtagttacaaagaactttagcctatagtaaatattcaaatgcttgaaaatgccagcaaacattattgggtagcatttgaaattgaaatcaccagtttaagggcttattttgttgccaaaaatttttattctttggaacacaacttataggatttttataaagtatatatgcatataaatttattaatatcacattttttccccaaaatgactcaccattgtcaacaaacacaatcacaaacacatccttacaacatggccacagctgcaggcaaggttggttaggttagggtggctttcctcctatgtgtgctgtaccagttcctggaaatgtcaaccttaaccttcagctgcaggctttcattttgctacgatgttagtggagttcttcaaacacgtgtctttgtattgattgtgaagctttaattcttgcagtagaattataatactttttcctattttcctgatttcttaattagcttttcttgggattttcgattctgaaaaacatatatttccagatacatattgggaaataattctctcatggaaacattaaagtatttaagttagtttctatattccatccatttcaatattacatgtccggtcttggataggatcactctttctgggagtaactcaggacaccactgttcaaaatgagaggactcactaaagaaagtttccactagctgatcatggacatctaccaccaccattattcgatagtgtttgcaaggtcttcctccagcaaagagctactttaaaaatgtaaaagtggccaggcatggtggctgatgcctgtaatcccagcactttgggaaactgaggctggtggatcacaaggtcagaaggtcaggagtttgagaccagcctgaccaacatggtgaaagcctgcctctactaaaaatacaaaaattagccaggcatggtggcacgtgcttgtaattccagctattcaggaggctgaggcaggagaatcgcttgaacccgggaggtggaggttacagtgagccgaaattggaccattgcactccagcctgggcagcagagtgagactctgtctccaaaaaaaaaaaaaaaaaaaaaaaaaaggtaaaagctggaccacagcaggcagggaaaattcatacctggaatggtttggaagaaaatattgatctgagagccctctgggcctttgatgaaaatggctgcattgggccatgttggttacctcattttattatggagaacagaataacagtaagagtatcagatcacctgaattaaattcctgacactagttgtgagacaccgagcaagtggcttaacttctctagacctcagttttcttgtctgtatggccctcatagagtgggtgtggggattaaggcacgtgataactatgcactaagaagaacctgctgttttcttctagaaaataacacatgggattaccgagagtgcatctgaccagcacttgttttcattattcagagctctaaatgttactggtggtactcacagctacatggcatgcagagtctggccatctgacctggcaccatacattcctaaaagggtgttgccatgttcaggctgaagccctcaaaccaaatacgaacaatggtgccaggaaaggaccttatgtttggtgacttctcgtcttgacacatcacaggactgctagaggcagctttggacttaagcgttgtccggaacacatagacggaacagactgaatcgatgaatggtgaggcagccttgagaccagctgcagggcagtgtgacctcccctatgccagggcagcctttgaggtgttctgcccttgttcctctccacatttccagctgtaagtgcaggttttgtaaaagaaagagtcgagaagagtttgtcttcagaatctatctcaaagagatggaggacctttcagttacagtcacataatctgaagtcagagtcccttggctggtttggttctcgggtagccagtaaagagtttgcactggtttattgtaggaaggtttaaattaagagtacaagtgcaaactttattacacgtagatttaaaactactttcttctcctaatggctgtgtgatttcggatgagttcgttattatctctcaggttctgtttccttggttaaaaaaaatgggaataacaatagtaccaatctcacaaagttatcttgagagttaaatagaatcatatatgtaaaaagctctcaatagattagagtttcagttttagaaggtataaagagttatgaagaagggtggtggtgatggttatataacattatgaatatacttaacaccattcaactgttcacttaaaaatggctaaaatggtaaattttatgttgtatgtattttaccacaataacaaacttggaaggaaaaaagctttcaacagagatcctagaacacagtgaacactcaaaaaatattaagtatttttattattacagttgagtcaaggaggtgtaccaatactcctcagcatgctttaatgcggcatcctttggaacatcaaaagtgattttctcataaaaatctggtaaagaagggaattaggtgagtttagtcatccctggggactgaattgtctatcatccatgcctatatttgcacaacctgttgttcttggatgtgaacagcatgggggtgggtgggtgaaaagaagggagagattgctatgggagagggagagaccccctgtgttaagtgattagatatggaagaggtaggtcacaagactcctgccaacaccactagaggttgacggctgggaaatctttagccttttcctgtcagttgtttaacttattccaacccatttaacttatttgaatcctggccttgttaaatcacaagattatttttagaggctcttgagtagtctttatgaataaggcttttaaatagcaccccaatccaccactcgtcatgccttgatggcaggaacagtctttgcaaagaccaggtttatctagtctttgcaaggaccagtgataagacttcagaagatgcaaatatcacatttcagtgggaccaggcagaaaattattcttcagtgttgctctgatcaaagactggcaaagatggatatttaggaaacagctctgattttctgatccatccttatatttctgattcattagttattaaaatgaaattaaaaagtatgaagccagaagcttccagggcctctttctcaggctacaccatgcacactgctgggctactcccaccccacttataaagcatgcaccatcagcagtctctgactatacacagtgctcagaatgtcttctcagaccatatccctattccccaaatggagggatggattcccagcacctatgcatactgtgtgacttccccccttcctggaatgatttctgattcagtgcttgtatgataatagtcaacaacatagtaataaagtagctgttttcagtgccttgtatgtgttaggcacttacatcactagatataatataatgatataatatatcactagatttaatataatggtatactatatcactagatatattgtattatttcatttaatcctcaaaactggttaagtatctctagcttacagatgaggatattgagttttggagaagaccagtgatttgcaatgaatggaattggaatttaaacctagatctgtttgactcaaggccttagtctttaactgctcaacagtgggtaagtggacctgggcatagcagcaatccctcattttggaggattggagctacatatcaatgtatatggcttaggagtgtctcttcttgacaccagccacgccctgccatttgactcggagtacacgtctctctcggctttcttcctaagacagatgttatctccatatttttgcccccaggtgtgtactactggcagctcttgccttgagcttatgatatacacttgttggctgacattttagtcttgtggtaattagctaagaacttgaccctggagtcagattcaaactacagcccttctacttgctagaactgtggccctgcaaaagttgtttaatctctctcagttttcacatctgtaaaatgggaatagtagcagcatgcaattcgtgggactattacgaagacatgaggtaaaggcttagaatggcaaatggttcatggtagctgcttaatacaattattcaaacttgggagagttcactgaatgttacctatagctaaaaacatgctaagaatttgcatactgtccactacaatctttaattccttgactttggtgtgattcttttttaatttttattttttgagacagggtctcactctgttgcccaggctggagtgcagtggtgcgatcatggcttgctgcagccctggcctctcagactaagagatcctctcacctcagcctcccaagtagctgggattacaggagcatgccaccacacctggctaatttttgaagttttttctagagatggggtctccctatattgcccaggctagtcttaaactcctgggctcaagggatcctcctaccttggcctcccaaagtgctaggattacaggcatgagccaccatgcctggcctgatttgattctttagcaaatatttattgagtgcttattacatgctgcatactgcacatatagatgtcatggatacagagaagaataaagccccaattgtccctgctctcaaaaaatgtgctatgccatggggtagacagtcctgttaggacatacatttaactcaatgtgctaagagtgcagggctcattaggagcctggaggagtgtacatggattagcctggctattcaaggaaggaagagcaaagagttagctacacgtggaaagatgggaaaggatttctatgcaaagagaacatatactaaatatacaaaggtgggaaacgaccatgtggtgagaggacctatgagtggtttcctgatgttggaatatgcattttacactaggaaatgaggctggagacaaatgtgggcatgtggagcttgggttttattctgtaggacatagtgtgggggcactaaaaggattttagtggggaaattacagtatagagtgagggtgtaaggtggttggaggtcaagactggagcagggagagcaggcaggaggcttttgacagacagaatggcacaaaccggagcagccaaggtgggaatgagcgaaaggaatgagtggagaaatatttaggaggtgagactgcaggacccataattgattggatttgcaggagcgggaaggaaaggagtctttgatgattaccttttgctgttgtaaatcctgagttaatgtaccccttccctgggagttttcattttagaggatgcttcttattctatattttcagaaggatcagttagacaattagttgcacagactcctaatgttcagtagggaagctacctaaggagttggagtcagttctaagcagtcaacttaaaaggcagtggagatacagcatttagtgtctctgtgtctcagttttctaatctgtaaagtcaatgctagctccattggatccatgtgagaactaaataagacaaagcttttataatagtatctcctgtagagcaaaccctcaaaatagttgagttacagttagtattatgctttttactgttattcattttatagcatagcctcatgaatctgattacctgggttcaaacccaagctctgggtgaaatggaaaaaagttacctaatgtcattaagcctcagtttctcatctgtaaaatggggaaataatagacaataataaaaaaaaaaagggcctattgcataggcttgtgtgtagacgggatgaaggaatgcataccaaacatgtagctcagatcctggctcacagtaagaagtcgggaaatgtaagctacggctctattccttgttgtgtgctaggcacttttgtgtatgagatacaatttcatttcccctgcatccaatagagtgggttatatgatccccattttatagatgaggagattgaagcatggggaggttaagcaaatttgttcaaggtccacagccatagatgatctggtataagttattccatttagaatgacttgatactaggccgggcacggtggctcacgcctgtaatcccagcactttgggaggctgaggcgggcggatcacaaggtcaggagatcgagaccatcccggctaaaacggtgaaaccccgtctctactaaaaatacaaaaaattagccgggcgtagtggcgggcgcctgtagtcccagctacttgggaggctgaggcaggagaatggcgtgaacccgggaggcggagcttgcagtgagccgagatcccgccactgcactccagcctgggcgacagagcgagactccgtctcaaaaaaaaaaaaaaaaaaaaaagaatgacctgatacttttagaatctttaggaaagttcctgtaggcccataggaaaaggagtttatagttacacctagttcatgactatattaatttatgtcagaagggaattagaatcatcatcaaaagttagagttggaagtaactttattgagtatttggaaaaatgaattgcaacctcatgtctcctgatgtgtagtttaaaacataacaaagcaacaacaaacaacaacaacaacaacaatccaacatactaccaaatttatgccaaaatcccaaatggaaaacaggtaatgtggttctatgctggctggaggacaggcaggacagtttgagccctttcccccacctgttctaaaagggtgtcacaaagccccaaggcacactttaaaaatcacaaatcagaaaaatccgtgtttgactaatgaggaaactgagggtagaggcagaaagtgactttccaatgtcacacaccagggactcattggagtcaaggttagcaattcatctcttttggttggcccagctgtacagtcactggtgttgccaccccttccatgtgctatgcagactgttgaggaaggatgctcccttttggacaaaagcctgtattaatgttcacagtactaatacttaatttatttttttatttttttttgtgctttttaaattttctataataaatatgtattgcttctataatcagaagagataacttttggtttttaattaattaattttttttaagagatagagtcttgctctgtcctccaggctggagtgtagttgtgtaatcatagctcactgcatcctccaactcctgggctcaagcaatcctcccaccttagtctgccaagtagctaggactacaggtgcgcaccaccatgcccagctaatattttattttattttattttgtagggatggggtctccctgtgttgcccagactgatctctaactcctggcctcaagtgatcatcctgcctcagtctcccaaagtgcagggattacaggtgtaagccactgtgcccagccagaaaagatattttaaaaaatactaaattgatgaagagatgatttgtatgcctggcatggggaatcccaagtttttggacttttctcatctcttgtgatttctctgagtgcttgttgtggtgattttgggttgggtctggaggctgctccagagagatattatgttgttctgtgatggcgtgtttgctctctatttgtttatttttgatactgcccaaagtaaggcccagcattagagacctcctctcaactgtccctaatcttcccctctagtatcatctcttaagactctagttaaaaatggctaattgactgtcaaccacaccaagtcaattggtgccaattgctgcctttcagtttttacccatatagttccacctgtctaagaatgccttttccccccaatctctgctattgaagtactgatactgcctttcaaaggcccatttcacacccatttcactcattcactgatttattaatctatcaacaaatatttattaagggcctccatctgccaggcactgactgttctatgcccttggattagaatggtgaacagaatagacatggtctctttaattacacaggtaaatcttcagtgagagcctgatagtaagcaagtaaacatatggagttcatacatccatctatccatccaatttcaaaatgtggtaagtgcgatgaaagaggataacgagtggccctatttcaggatgggtggtcaaagaaggcctctcgggagaagtgccctttgagctgacacttgaagaatataagggaaggactgtgggaatgaagagggaagagctttttaggcagaggtcctcagctagaagagttggaagaactgaagcaagcccagcgaggctggagcagagtggatgactaatgaccactcaagtgctaaatgtttcactgatgcattttgtatattatttgtctccctctgctagagtgcaaaattcaggaaggaaggtatttttgtctgatttctttactactttatcctcagtgtctaaaacagtgctttgaacatagtaggcactcagtaaatatgttcgagtgaatgaatgcatgaataaataaataagagtgtgatggaagaaaactggagaagtaggcagggatgacatcatacagggcctgtgggttatgataaatgcttggattttattttcatgaagtggcaaataacgggaattttaacggaagaattacatgacctaagatagcctttaaatatgtcccacctgacttttaggtggaaaaagggctggaggttggcagttgaagaagcaagttaaaagtctattgcagtaacttggcaggaggcatcatggtactgttggcagtgtggatggagaggaagagatgaattcatgatggtttttggaggacagacaatagcaggatttgctgatggattttgtggttgacattgtagattgatttcctaatatccattctccctttctttcctattaatataatgttatagaatataaataatgtaacatttataatgtaagtgtggtttgggggtgacaatgtacctaactaaaaagaaaattctgtattttccagcttctcttgcaactaagggtagtcatgtgatatagttcagaccaatgagatgtaagagggaaatgctgcataggggattctggaaaagctctttaaaaggaagtggatttaactgccaaataaatttttccctttgttcttcctcttcttcttgcctgaattgcagatgccgtttggagtagctactttgaggacaagagacaaaaagcctgaggagaaagtcaccatgaaggaaacagaaagactaaacagcatgcgtgatctttgattcagagtccccatctcaccctggactgccttcctttggaattcccttgtggaaaaaaaaattaaactcttatttggttaaatcattgtaagttaaatttagtttatgtatcaccaaacttatttctaactgattcagattggatgtgggagaagcaagataggataattctattttttcccccttccctcaaacaactgtttaaatggaagactgggtgaggaacagattttaaatggaggttgtgtatgtcagtatgtatatgtttgtgtctctgtgtgtgtgtgtgtgtgtgtgtgtgagagagagagagagagagacagagagagagagagagagagagagagagaagatgaaatccaagacttccattttggatagttaaagcttgagatatctgttagatatccacattgcaatgttaaccaaacagttggttttgtgaccttgtctttcaaagaagagtctggaataaagatagaaatctggcagttgtcagcatagagatggtatttaaagtcatataaatggctgagatttcccagagcaggagagtatgtagatggaagagcaaaaggcccatggctaaaccctgaaagtgtcagcatttagaggtgaggagaggaagagttgctgtagaagaagaaggaatagcctgtggggatcaccaggagggcaaagttacgtcaagacagtgggtttcctgggcccacctcgtttttgtgtggcacactcacgcaaatggacactttttacaccttgcactggatattagttctcttcttgtgtgtgggctgctttccctcttgttgagatttcaggtctccagggactggggtcatgtctgtcctttgtagttccccaaaccaggcacagcacttcaccttgaggtgatgcttgctaatgcttggcaatggtaatctgtgcccactgggggcagggagaaaaaagggggtgtttagaaacagaaagctagtttggaaaatgaaaaaattggaaagtatgctcaatcctaggttgaaagtctccttgagcagcagaatgagatacattatctgactagagagaaggctttttaagaattttgagagcataggttgactataggtcatagggcctaggaaaaatcaaaaagatgaaagaagagatggtgcagaatccaagaatttcattgtgtcagggttcaggtggagagagtagctttcaccagaaacactaagggcttatattagaagttgagcaggaaaggacggcgtgttcccagggctgggatgagctcatgatggctgctggggtgaaataaagaggaaggaacaataaaaccaagactacatgctgacccacagttatggcataggcttattctcgagatttcctacagtggtctttggcacaaagtgctgatgtcctattatggaggcctaggttgtgggagggaagtgaagccctgggctagaaggccaaactccaaatccttcatttattcacacattcattcatatttggtatgcaattactataagcaagtcctgaggatacggtggtgtaaaaggcaaaacatatacctgatttcatggaactcacattctaggggtggtttgtgtatatatgagaacagtaactagaaaaaaataatgaacaaggtattttatgtaacgataagagctatgaagaaaatcagacatgacgattttcagctagagctacccaaagcatgatctttgagtcaacaacaacatatgagcaatcagtttgttaaaaatgcagaatctcagaagacggcctagacctactgattcagaatcatcattgtaacaggatccccttgtcatttctttgcatgctaatgtttgagaagcactgagctagacagtgggaaatggaaggtttctctgcctaggtgacatctgagctgagacttgaatgaagaaaagctgtccatgtaaagatctgggagcagaaggatccaggcagaggaaatggaaagtacaaggggctggatgagagaa

SEQ ID NO: 11 - DNA, 8019 bp, Artificial Sequence
  Description of Artificial Sequence:/note = synthetic construct
tcgtcgaaaatacatagacggatcacagtgcacggctgcggatagggagcagtggcttcgtttcatgcaggaaagagaacttggttcaggagtgtctacgttgcttaagacaggagagcactaaaaatgaaaccatccagccatcctcccccattttcattttcacaccaaagaatcccaccgcggcagaggaccaccgtctctctgtttagacaatcggtgaagaatggatgacctcactttccccaacaggcgggtcctgaaatgttatgcacgaaacaaaacttgagtaaatgcccaacagaggtcactgttttatcgatcttgaagagatctcttcttagcaaagcaaagaaaccgattgtgaaggtaacaccatgtttggtaaataagtgttttggtgttgtgcaagggtctggtttcagcctgaagccatctcagagctgtctgggtctctggagactggagggacaacctagtctagagcccatttgcatgagaccaaggatcctcctgcaagagacaccatcctgagggaagagggcttctgaaccagcttgacccaataagaaattcttgggtgccgacgcggaagcagattcagagcctagagccgtgcctgcgtccgtagtttccttctagcttcttttgatttcaaatcaagacttacagggagagggagcgataaacacaaactctgcaagatgccacaaggtcctcctttgacatccccaacaaagaggtgagtagtattctccccctttctgccctgaaccaagtgggcttcagtaatttcagggctccaggagacctggggcccatgcaggtgccccagtgaaacagtggtgaagagactcagtggcaatggggagagcactggcagcacaaggcaaacctctggcacagagagcaaagtcctcactgggaggattcccaaggggtcacttgggagagggcagggcagcagccaacctcctctaagtgggctgaagcaggtgaagaaagtggcagaagccacgcggtggcaaaaaggagtcacacactccacctggagacgccttgaagtaactgcacgaaatttgagggtggccaggcagttctacaacagccgctcacagggagagccagaacacagaagaactcagatgactggtagtattaccttcttcataatcccaggcttggggggctgcgatggagtcagaggaaactcagttcagaacatctttggtttttacaaatacaaattaactggaacgctaaattctagcctgttaatctggtcactgaaaaaaaattttttttttttcaaaaaacatagctttagcttattttttttctctttgtaaaacttcgtgcatgacttcagctttactctttgtcaagacatgccaaagtgctgagtcactaataaaagaaaaaaagaaagtaaaggaagagtggttctgcttcttagcgctagcctcaatgacgacctaagctgcacttttccccctagttgtgtcttgcgatgctaaaggacgtcacattgcacaatcttaataaggtttccaatcagccccacccgctctggccccaccctcaccctccaacaaagatttatcaaatgtgggattttcccatgagtctcaatattagagtctcaacccccaataaatataggactggagatgtctgaggctcattctgccctcgagcccaccgggaacgaaagagaagctctatctcccctccaggagcccagctatgaactccttctccacaagtaagtgcaggaaatccttagccctggaactgccagcggcggtcgagccctgtgtgagggaggggtgtgtggcccagggagggctggcgggcggccagcagcagaggcaggctcccagctgtgctgtcagctcacccctgcgctcgctcccctccggcacaggcgccttcggtccagttgccttctccctggggctgctcctggtgttgcctgctgccttccctgccccagtacccccaggagaagattccaaagatgtagccgccccacacagacagccactcacctcttcagaacgaattgacaaacaaattcggtacatcctcgacggcatctcagccctgagaaaggaggtgggtaggcttggcgatggggttgaagggcccggtgcgcatgcgttccccttgcccctgcgtgtggccgggggctgcctgcattaggaggtctttgctgggttctagagcactgtagatttgaggccaacggggccgactagactgacttctgtatttatcctttgctggtgtcaggaggttcctttcctttctggaaaatgcagaatgggtctgaaatccatgcccacctttggcatgagctgagggttattgcttctcagggcttccttttccctttccaaaaaattaggtctgtgaagctcctttttgtcccccgggctttggaaggactagaaaagtgccacctgaaaggcatgttcagcttctcagagcagttgcagtactttttggttatgtaaactcaatggttaggattcctcaaagccattccagctaagattcatacctcagagcccaccaaagtggcaaatcataaataggttaaagcatctccccactttcaatgcaaggtattttggtcctgtttggtagaaagaaaagaacacaggaggggagattgggagcccacactcgaattctggttctgccaaaccagccttgtgatcttgggtaaattccctaccacctctggactccatcagtaaaattgggggtggactaggtgatctcatagatccttcctgctggaacattctatggcttgaattatattctcctaattattgtcaaaattgctgttattaagtatctactgtgtgccaggcactttaaataaatattgtgtctaatcttcaaaacaaatttgcaaggaaggtttttggagataaggaaactgagactcaggattaagtaacacacctaaagtcaaaggtgagcttggaactgaacccaagtgtgcccccactccactggaatttgcttgccaggatgccaatgagttgtagcttcatttttcttagagactttcctggctgtggttgaacaatgaaaaggccctctagtggtgtttgttttagggacacttaggtgataacaattctggtattctttcccagacatgtaacaagagtaacatgtgtgaaagcagcaaagaggcactggcagaaaacaacctgaaccttccaaagatggctgaaaaagatggatgcttccaatctggattcaatgaggtaccaacttgtcgcactcacttttcactattccttaggcaaaacttctccctcttgcatgcagtgcctgtatacatatagatccaggcagcaacaaaaagtgggtaaatgtaaagaatgttatgtaaatttcatgaggaggccaacttcaagcttttttaaaggcagtttattcttggacaggtatggccagagatggtgccactgtggtgagattttaacaactgtcaaatgtttaaaactcccacaggtttaattagttcatcctgggaaaggtactcgcagggccttttccctctctggctgcccctggcagggtccaggtctgccctccctccctgcccagctcattctccacagtgagataacctgcactgtcttctgattattttataaaaggaggttccagcccagcattaacaagggcaagagtgcaggaagaacatcaagggggacaatcagagaaggatccccattgccacattctagcatctgttgggctttggataaaactaattacatggggcctctgattgtccagttatttaaaatggtgctgtccaatgtcccaaaacatgctgcctaagaggtacttgaagttctctagaggagcagagggaaaagatgtcgaactgtggcaattttaacttttcaaattgattctatctcctggcgataaccaattttcccaccatctttcctcttaggagacttgcctggtgaaaatcatcactggtcttttggagtttgaggtatacctagagtacctccagaacagatttgagagtagtgaggaacaagccagagctgtgcagatgagtacaaaagtcctgatccagttcctgcagaaaaaggtgggtgtgtcctcattccctcaacttggtgtgggggaagacaggctcaaagacagtgtcctggacaactcagggatgcaatgccacttccaaaagagaaggctacacgtaaacaaaagagtctgagaaatagtttctgattgttattgttaaatctttttttgtttgtttggttggttggctctcttctgcaaaggacatcaataactgtattttaaactatatattaactgaggtggattttaacatcaatttttaatagtgcaagagatttaaaaccaaaggcgggggggcgggcagaaaaaagtgcatccaactccagccagtgatccacagaaacaaagaccaaggagcacaaaatgattttaagattttagtcattgccaagtgacattcttctcactgtggttgtttcaattctttttcctaccttttaccagagagttagttcagagaaatggtcagagactcaagggtggaaagaggtaccaaaggctttggccaccagtagctggctattcagacagcagggagtagacttgctggctagcatgtggaggagccaaagctcaataagaaggggcctagaatgaaacccttggtgctgatcctgcctctgccatttctacttaagccagggtttctcatatgttaacatgcatgggaattccctgggcatcttcttgtggtgtggagtctgacttagcaagcctcgggtgggtttgagggtcaaatttctaccaggcttatatccctggtgatgctgcagaattccaggaccacacttggaggtttaaggccttccacaagttacttatcccatatggtgggtctatggaaaggtgtttcccagtcctctttacaccaccagatcagtggtctttcaacagatcctaaagggatggtgagagggaaactggagaaaagtatcagatttagaggccactgaagaacccatattaaaatgcctttaagtatgggctcttcattcatatactaaatatgaactatgtgccaggcattatttcatatgacagaatacaaacaaataagatagtgatgctggtcaggcttggtggctcatgcctgtattccctaaactttgggagcctaaggtgagaactccttgaactcctaaggccaggagttcaagaccagcctggataacatagcaagaccccatctctacaaaaaaccaaaaccaaacaaacaaaaatgatagtggtgcttccctcaggatgcttgtggtctaatgggagacagaacagcaaagggatgattagaagttggttgctgtgagccaggcacagtgctgatataatcccagcgctatgggaggctgaggtgggtggatcatttgaggccaggagtttaagaccagcctggtcaacatggtaaaaccccatctctacttaaaaatacaaaaaagttagccaggcatggtggcatacacctgtaacccagctactcaggaggctgaggcacatgaatcacttgaacccaggaggcagaggttgctgtgcaccactgcactccagcctgggtgacagaacgagaccttgactcaaaaaaaaaaaaaagaagtttgttgctatggaagggtcctactcagagcaggcaccccagttaatctcattcaccccacatttcacatttgaacatcatcccatagcccagagcatccctccactgcaaaggatttattcaacatttaaacaatcctttttactttcattttccttcaggcaaagaatctagatgcaataaccacccctgacccaaccacaaatgccagcctgctgacgaagctgcaggcacagaaccagtggctgcaggacatgacaactcatctcattctgcgcagctttaaggagttcctgcagtccagcctgagggctcttcggcaaatgtagcatgggcacctcagattgttgttgttaatgggcattccttcttctggtcagaaacctgtccactgggcacagaacttatgttgttctctatggagaactaaaagtatgagcgttaggacactattttaattatttttaatttattaatatttaaatatgtgaagctgagttaatttatgtaagtcatatttatatttttaagaagtaccacttgaaacattttatgtattagttttgaaataataatggaaagtggctatgcagtttgaatatcctttgtttcagagccagatcatttcttggaaagtgtaggcttacctcaaataaatggctaacttatacatatttttaaagaaatatttatattgtatttatataatgtataaatggtttttataccaataaatggcattttaaaaaattcagcaactttgagtgtgtcacgtgaagcttaatataaacaagtttcttgtcactgccaccaccacgaccaaaaaaagctaatcaatcactatatataatacatatatatactatatataataaatatatatactatatataatacatatatacactatatataatacatatatactatatatacacatatatactatatatacacatatatattatgaatgtatatatatagtatatatagtatatatactatgtatgtatatatatagtatatatagtatatatactatgtatgtgtatatatagtatatatagtatatatagtatatatactatgtatgtatatatatagtatatatagtatatatactgtgtatgtatatatatagtatatatatactatatatgcatacatagtatatatgcatatatactatatatactatatatttatatatactatatactatatatactatatactgtatatatactatatatgtatgtatacgatatatatatatactatatatgtacacacacacatatatatatacatataagcacctactacatgccaggcatcattaaatgtgttgcatccatcacgtcatttaaccccagcacttgcacactcctttctggttgtggaagactaagtaatttatctaagtcacccagctggaaggtcaggcagggacccagatttgaaatccaagtctacctacctacaggtcccctactcttaacctgtaggtcccactgcctacccaggaactgagggatgatgtagaaaatcccaaaacatgttaatatagggaatacctataaacatgcaatcaaagtctttgggactatacaaccactgtataaagcataacaatgtacaagcttccaaacaataactagaagttctgcctccctcttctgggttcctaaagcactgcacctatctacctgtcaaagcatctaccacattgtaccacaccttaaaatcaatggtttttttcttctcagccagcatgtggatgcctcaataaagcagactcctttcatgacctaaaactaatttcaggggggaaaaaaagacgagctgggcgcagtggctcacgcctataatcccagcactttgggaggctgaggcgggaggatcacttgaggtcagaagaccagcctggcccaacatggcaaaaccccgtctctactaaaaatacaaaaattagctgggcgtggtggcgcacctataatcccagctactcaggaagctgagacatgataatcgcttgagcctgggaggtagagcctggggctgcactccatcctgggcaacagagggagattctgtctcaaaaaataataataataatataaataaataaataatttttttaaaaaaagactctttcctatattaatctttgcatcctgtgcccatggccccaaacctgaccaatgaaggccccagtaaatattttttgaacaaaagaaaatatagatgatcaaagataagaaagataagaagacacctcaattcttgta

1. A method of identifying a compound that modulates androgen receptor activity comprising,
a) administering a compound to a system, wherein the system has androgen receptor activity; and wherein the system comprises a protein which interacts with the androgen receptor
b) assaying the effect of the compound on the amount of androgen receptor activity in the system; and
c) selecting a compound which causes a change in the amount of androgen receptor activity in the system.

2. A method of modulating androgen receptor activity comprising administering a compound, wherein the compound causes modulation of androgen receptor activity, wherein the compound is defined as a compound capable of being identified by administering the compound to a system, wherein the system has androgen receptor activity; and wherein the system comprises a protein which interacts with the androgen receptor, assaying the effect of the compound on the amount of androgen receptor activity in the system; and selecting the compound if it causes a change in the amount of androgen receptor activity in the system.

3. A method of modulating androgen receptor activity comprising administering a compound that causes an inhibition of an interaction between androgen receptor and a protein selected from the group consisting of Smad3, Smad4, Akt, TGF-B, and PTEN or fragment thereof.

4. A method of making a composition capable of modulating androgen receptor activity comprising mixing an androgen receptor modulating compound with a pharmaceutically acceptable carrier, wherein the compound is identified by administering the compound to a system, wherein the system has androgen receptor activity; and wherein the system comprises a protein which interacts with the androgen receptor, assaying the effect of the compound on the amount of androgen receptor activity in the system; and selecting the compound if it causes a change in the amount of androgen receptor activity in the system.

5. A method of making a compound that modulates androgen receptor activity comprising,
a) administering a compound to a system, wherein the system has androgen receptor activity; and wherein the system comprises a protein which interacts with the androgen receptor
b) assaying the effect of the compound on the amount of androgen receptor activity in the system; and
c) selecting a compound which causes a change in the amount of androgen receptor activity in the system., and
d) synthesizing the compound.

6. A method of modulating androgen receptor activity comprising administering a compound, wherein the compound is identified as changing the amount of androgen receptor activity in a system.

7. The method of claim 1, wherein the change in the amount of androgen receptor activity is a decrease in the activity.

8. The method of claim 1, wherein the change in the amount of androgen receptor activity is an increase in the activity.

9. The method of claim 1, wherein the activity is the cellular proliferation activity of androgen receptor.

10. The method of claim 1, wherein the activity is the apoptotic activity of androgen receptor.

11. The method of claim 1, wherein the activity is the transcription activation activity of androgen receptor.

12. The method of claim 1, wherein the activity is the PSA altering activity of androgen receptor.

13. The method of claim 1, wherein the modulation is an inhibition.

14. The method of claim 1, wherein the modulation is an enhancement.

15. The method of claim 1, wherein the system is a cell.

16. The method of claim 15, wherein the cell comprises a nucleic acid encoding a first protein, selected from the group consisting of AR, Smad3, Smad4, Akt, PTEN, and TGF-B such that expression of first protein mRNA can occur.

17. The method of claim 15, wherein the system further comprises a nucleic acid encoding a second protein selected from the group consisting of AR, Smad3, Smad4, Akt, PTEN, and TGF-B, such that expression of second protein mRNA can occur.

18. The method of claim 15, wherein the system further comprises a nucleic acid encoding Smad3.

19. The method of claim 18, wherein the system further comprises a nucleic acid encoding Smad4.

20. The method of claim 16, wherein the expression of the first protein mRNA is regulatable, constitutive, or inducible.

21. The method of claim 17, wherein the expression of the second protein mRNA is regulatable, constitutive, or inducible.

22. The method of claim 20, wherein the expression of the first protein mRNA is regulatable, constitutive, or inducible.

23. A method of identifying a modulator of an interaction between androgen receptor and Smad3 comprising
a) administering a compound to a system, wherein the system comprises Smad3 and androgen receptor,
b) assaying the effect of the compound on a Smad3-androgen receptor interaction, and
c) selecting a compound which modulates the Smad3-androgen receptor interaction.

24. A method of identifying a modulator of an interaction between androgen receptor and Smad4 comprising
a) administering a compound to a system, wherein the system comprises Smad4 and androgen receptor,
b) assaying the effect of the compound on a Smad4-androgen receptor interaction, and
c) selecting a compound which modulates the Smad4-androgen receptor interaction.

25. A method of identifying a modulator of an interaction between androgen receptor and Akt comprising
a) administering a compound to a system, wherein the system comprises Akt and androgen receptor,
b) assaying the effect of the compound on a Akt-androgen receptor interaction, and
c) selecting a compound which modulates the Akt-androgen receptor interaction.

26. A method of identifying a modulator of an interaction between androgen receptor and PTEN comprising
a) administering a compound to a system, wherein the system comprises Smad3 and androgen receptor,
b) assaying the effect of the compound on a PTEN-androgen receptor interaction, and
c) selecting a compound which inhibits the PTEN-androgen receptor interaction.

27. A cell comprising,
a) a regulatable nucleic acid comprising sequence encoding an AR gene and
b) a nucleic acid comprising sequence encoding a Smad3 gene.

28. A cell comprising,
a) a regulatable nucleic acid comprising sequence encoding an AR gene and
b) a nucleic acid comprising sequence encoding a Smad4 gene.

29. A cell comprising,
a) a regulatable nucleic acid comprising sequence encoding an AR gene and
b) a nucleic acid comprising sequence encoding a Akt gene.

30. A cell comprising,
a) a regulatable nucleic acid comprising sequence encoding an AR gene and
b) a nucleic acid comprising sequence encoding a PTEN gene.

31. A cell comprising,
a) a regulatable nucleic acid comprising sequence encoding an AR gene and
b) a nucleic acid comprising sequence encoding a TGF-B gene.

32. A method for modulating androgen receptor-mediated transactivation activity in a cell, comprising the step of:
treating the cell with an agent that modulates the activity of a pathway from or to androgen receptor-androgen receptor coactivator interaction.
